(19) United States
(12) Patent Application Publication
(10) Pub. No.: US 2022/0204975 A1
(43) Pub. Date: Jun. 30, 2022

(54) SYSTEM FOR GENOME EDITING

(71) Applicants: President and Fellows of Harvard College, Cambridge, MA (US); The Broad Institute, Inc., Cambridge, MA (US)

(72) Inventors: David R. Liu, Cambridge, MA (US); James William Nelson, Cambridge, MA (US)

(73) Assignees: President and Fellows of Harvard College, Cambridge, MA (US); The Broad Institute, Inc., Cambridge, MA (US)

(21) Appl. No.: 17/602,738

(22) PCT Filed: Apr. 10, 2020
(86) PCT No.: PCT/US2020/027836

§ 371 Date: Oct. 8, 2021

Related U.S. Application Data
(60) Provisional application No. 62/833,494, filed on Apr. 12, 2019.

(51) Int. Cl. C12N 15/113; C12N 9/22; C12N 15/11; C12N 15/90; C12N 15/86

(52) U.S. Cl. CPC C12N 15/113; C12N 9/22; C12N 15/11; C12N 15/907; C12N 2750/14143; C12N 2310/1241; C12N 2310/122; C12N 2310/20; C12N 15/86

(57) ABSTRACT

The present specification provides compositions and methods that are capable of directly installing an insertion or deletion of a given nucleotide at a specified genetic locus. The compositions and methods involve the novel combination of the use an engineered RNA enzyme (i.e., “ribozyme”) that is capable of site-specifically inserting or deleting a single nucleotide at a genetic locus and the use of a nucleic acid programmable DNA binding protein (napDNAbp) (e.g., Cas9) to target the engineered ribozyme to a specified genetic locus, thereby allowing for the direct installation of an insertion of deletion at the specified genetic locus by the engineered ribozyme.

### RELATED APPLICATIONS AND INCORPORATION BY REFERENCE

[0001] This PCT application claims priority to U.S. Provisional Application No. 62/833,494, filed Apr. 12, 2019, the contents of which are incorporated herein by reference.

### GOVERNMENT SUPPORT

[0002] This invention was made with government support. The government has certain rights in the invention.

### BACKGROUND OF THE DISCLOSURE

[0003] Small genomic insertions or deletions are known to cause a wide variety of genetic diseases. In addition, pathogenic single nucleotide mutations contribute to approximately 67% of human diseases for which there is a genetic component⁷. Unfortunately, treatment options for patients with these genetic disorders remain extremely limited, despite decades of gene therapy exploration⁸. Perhaps the most parsimonious solution to this therapeutic challenge is direct correction of single nucleotide mutations in patient genomes, which would address the root cause of disease and would likely provide lasting benefit. Although such a strategy was previously unthinkable, recent improvements in genome editing capabilities brought about by the advent of the CRISRP/Cas system⁹ have now brought this therapeutic approach within reach. By straightforward design of a guide RNA (gRNA) sequence that contains ˜20 nucleotides complementary to the target DNA sequence, nearly any conceivable genomic site can be specifically accessed by CRISPR associated (Cas) nucleases^{1,2}. To date, several monomeric bacterial Cas nuclease systems have been identified and adapted for genome editing applications¹⁰. This natural diversity of Cas nucleases, along with a growing collection of engineered variants¹¹⁻¹⁴, offers fertile ground for developing new genome editing technologies.

[0004] While gene disruption with CRISPR is now a mature technique, precision editing of single base pairs in the human genome remains a major challenge³. Homology directed repair (HDR) has long been used in human cells and other organisms to insert, correct, or exchange DNA sequences at sites of double strand breaks (DSBs) using donor DNA repair templates that encode the desired edits¹⁵. However, traditional HDR has very low efficiency in most human cell types, particularly in non-dividing cells, and competing non-homologous end joining (NHEJ) leads predominantly to insertion-deletion (indel) byproducts¹⁶. Other issues relate to the generation of DSBs, which can give rise to large chromosomal rearrangements and deletions at target loci¹⁷, or activate the p53 axis leading to growth arrest and apoptosis^{18,19}.

[0005] Several approaches have been explored to address these drawbacks of HDR. For example, repair of single-stranded DNA breaks (nicks) with oligonucleotide donors has been shown to reduce indel formation, but yields of desired repair products remain low²⁰. Other strategies attempt to bias repair toward HDR over NHEJ using small molecule and biologic reagents²¹⁻²³. However, the effectiveness of these methods is likely cell-type dependent, and perturbation of the normal cell state could lead to undesirable and unforeseeable effects.

[0006] Recently, the inventors, led by Prof. David Liu et al. developed base editing as a technology that edits target nucleotides without creating DSBs or relying on HDR^{4-6, 24-27}. Direct modification of DNA bases by Cas-fused deaminase enzymes allows for C⋅G to T⋅A, or A⋅T to G⋅C, base pair conversions in a short target window (˜5-7 bases) with very high efficiency. As a result, base editors have been rapidly adopted by the scientific community. However, the following factors limit their generality for precision genome editing: (1) “bystander editing” of non-target C or A bases within the target window are observed; (2) target nucleotide product mixtures are observed; (3) target bases must be located 15±2 nucleotides upstream of a PAM sequence; and (5) repair of small insertion and deletion mutations is not possible.

[0007] Moreover, current methods to repair small genomic insertions or deletions are inefficient, generally restricted to mitotic cells, and prone to result in the stochastic insertion or deletion of random nucleotides (indels). No published method directly enables the insertion or deletion of a given nucleotide at a specified genetic locus. The development of such a technology would advance genome editing therapeutics by enabling the direct correction of frameshift mutations.

[0008] Therefore, the development of programmable editors that a flexibly capable of directly introducing any desired small genomic insertion or deletion, for example, frameshift mutations, at a specified site with high specificity and efficiency would substantially expand the scope and therapeutic potential of genome editing technologies based on CRISPR.

### SUMMARY OF THE DISCLOSURE

[0009] In one aspect, the present disclosure provides a genome editing strategy for the site-specific insertion of single nucleotides (e.g., G, A, T, or C) into defined genomic loci that combine the use of a napDNAbp, guide RNA, and an engineered ribozyme. In another aspect, the disclosure provides a genome editing system for the site-specific insertion or deletion of one or more nucleotides into defined genomic loci. As such, the present disclosure provides for compositions, methods of gene editing, fusion proteins, nucleoprotein complexes, nucleotide sequences encoding said fusion proteins and nucleoprotein complexes, vectors comprising nucleotide sequences encoding the fusion proteins and nucleoprotein complexes, isolated cells and cell lines comprising the vectors, pharmaceutical compositions comprising any of the compositions described herein, pharmaceutical kits for carrying out genome editing using the compositions described herein, and methods of delivery the genome editing system to cells under in vitro or in vivo conditions.

[0010] In certain aspects, the present specification relates to genome editing system comprising a napDNAbp, a guide RNA, and an engineered RNA that is capable of inserting or deleting one or more nucleotides at a target site. The genome editing system comprises compositions (e.g., fusion proteins and nucleoprotein complexes) and methods that are capable of directly installing an insertion or deletion of a given nucleotide at a specified genetic locus. The compositions and methods involve the novel combination of the use an engineered ribozyme that is capable of site-specifically inserting or deleting a single nucleotide at a genetic locus when combined with the use of a nucleic acid programmable DNA binding protein (napDNAbp) (e.g., Cas9) and a guide RNA to target the engineered ribozyme to a specified genetic locus, thereby allowing for the direct installation of an insertion of deletion at the specified genetic locus by the engineered ribozyme.

[0011] The genome editing system described herein embraces multiple possible configurations. For instance, in one embodiment, the genome editing system comprises a napDNAbp (e.g., Cas9) complexed with a guide RNA, and an engineered ribozyme provided in trans. In other embodiments, the engineered ribozyme may be provided in trans but may be recruited or co-localized to the napDNAbp/guide RNA complex at a target site through a recruitment means, such as an RNA-protein recruitment system. As an example of such a system, the napDNAbp may be modified by fusing it to an MS2 bacteriophage coat protein (MCP), and the ribozyme may be modified to contain an MS2 hairpin, which recognizes and binds to the MCP. Due to these modifications, the napDNAbp may recruit the ribozyme provided in trans through the interaction between the MCP on the napDNAbp and the MS2 hairpin element on the ribozyme. Any other known recruitment means may be used and the disclosure is not intended to be limited to the MCP/MS2 recruitment system. In other embodiments, the genome editing system comprises a napDNAbp (e.g., Cas9) complexed with a guide RNA, and an engineered ribozyme provided in cis, e.g., whereby the ribozyme is coupled to either the napDNAbp or the guide RNA. For example, the ribozyme could be coupled to the napDNAbp via a chemical linker (e.g., covalent bond, alkylene linker, polymeric linker, peptide linker). Or, the ribozyme could be coupled to the guide RNA as a transcriptional fusion, i.e., whereby the ribozyme sequence and the guide RNA sequence are transcribed as a single RNA molecule. It should be appreciated that the foregoing concepts, and additional concepts discussed below, may be arranged in any suitable combination, as the present disclosure is not limited in this respect. Further, other advantages and novel features of the present disclosure will become apparent from the following detailed description of various non-limiting embodiments when considered in conjunction with the accompanying figures.

[0012] In one embodiment, a previously evolved version of the group I self-splicing intron was modified to site-specifically insert and subsequently ligate into place a single guanosine nucleotide into single-stranded DNA (e.g., SEQ ID NOs: 88, 89, 156, or 157). Subsequently, the ability of this ribozyme to act on double-stranded DNA that was bound by a Cas9:guide RNA complex in vitro was demonstrated before its ability to function in human cells and bacteria was examined. It was found that localizing the ribozyme to the same genetic locus as Cas9 enabled it to modify its genomic target.

[0013] It should be appreciated that the foregoing concepts, and additional concepts discussed below, may be arranged in any suitable combination, as the present disclosure is not limited in this respect. Further, other advantages and novel features of the present disclosure will become apparent from the following detailed description of various non-limiting embodiments when considered in conjunction with the accompanying figures.

[0014] The present disclosure further relates to the following numbered paragraphs.

1. An engineered ribozyme represented by the structure of FIG. 1A.
2. An engineered ribozyme represented by the structure of FIG. 3B.
3. An engineered ribozyme comprising a deletion in the 3′ terminal end sufficient to remove the self-insertion activity of the ribozyme.
4. The engineered ribozyme of paragraph 3, wherein the deletion in the 3′terminal end comprises a deletion of the terminal 1-5 nucleotides of the ribozyme.
5. The engineered ribozyme of paragraph 3, further comprising an active site that catalyzes the insertion of a nucleotide into target site of a substrate single strand DNA molecule.
6. The engineered ribozyme of paragraph 5, wherein the active site comprises a region that hybridizes to the substrate single strand DNA molecule.
7. The engineered ribozyme of paragraph 6, wherein the region is 5 nucleotides, or 6 nucleotides, or 7 nucleotides, or 8 nucleotides and whose sequence is complementary to the substrate single strand DNA molecule.
8. The engineered ribozyme of paragraph 5, wherein the active site comprises a nucleotide that forms a wobble base pair with the substrate single strand DNA molecule.
9. The engineered ribozyme of paragraph 5, wherein the active site comprises an unpaired nucleotide.
10. The engineered ribozyme of paragraph 5, wherein the active site comprises in a 5′-3′ direction a region that hybridizes to the substrate single strand DNA molecule, a nucleotide that forms a wobble base pair with the substrate single strand DNA molecule, and an unpaired nucleotide.
11. The engineered ribozyme of paragraph 10, wherein the ribozyme inserts a nucleotide immediate adjacent to the wobble base pair.
12. A ribozyme-mediated programmable nucleic acid editing construct comprising a ribozyme and a nucleic acid programmable DNA binding protein (napDNAbp) which is capable of installing an insertion of one or more nucleotides at a target site in a DNA molecule.
13. The editing construct of paragraph 12, wherein the ribozyme is capable of inserting one or more nucleotides at the target site.
14. The editing construct of paragraph 13, wherein the one or more nucleotides is a G or A.
15. The editing construct of paragraph 13, wherein the one or more nucleotides is a C or T.
16. The editing construct of paragraph 12, wherein the ribozyme is represented by the structure of FIG. 1A or FIG. 3B.
17. The editing construct of paragraph 12, wherein the ribozyme is a modified group I intron from Tetrahymena thermophila.
18. The editing construct of paragraph 12, wherein the ribozyme further comprises a targeting moiety.
19. The editing construct of paragraph 18, wherein the targeting moiety is an MS2 hairpin structure.
20. The editing construct of paragraph 12, wherein the ribozyme and the napDNAbp are not fusion proteins.
21. The editing construct of paragraph 12, wherein the napDNAbp further comprises a targeting moiety receptor capable of binding to a ribozyme comprising a cognate targeting moiety.
22. The editing construct of paragraph 12, wherein the napDNAbp is a Cas9 protein or functional equivalent thereof.
23. The editing construct of paragraph 12, wherein the napDNAbp is a nuclease active Cas9, a nuclease inactive Cas9 (dCas9), or a Cas9 nickase (nCas9).
24. The editing construct of paragraph 12, wherein the napDNAbp is selected from the group consisting of: Cas9, CasX, CasY, Cpf1, C2c1, C2c2, C2C3, and Argonaute and optionally has a nickase activity
25. The editing construct of paragraph 12, wherein the napDNAbp when complexed with a guide RNA functions to bind to the target site in the DNA molecule and form an R-loop.
26. The editing construct of paragraph 24, wherein the R-loop comprise a single strand DNA region comprising the target site for binding the ribozyme.
27. A complex comprising the editing construct of any of paragraphs 12-26 and a guide RNA.
28. The complex of paragraph 27, wherein the guide RNA is fused to the ribozyme.
29. The complex of paragraph 27, wherein the guide RNA is bound to the napDNAbp.
30. A polynucleotide encoding the ribozyme of any of paragraphs 1-11.
31. A polynucleotide encoding the editing construct of any of paragraphs 12-26.
32. A vector comprising the polynucleotide of paragraph 30.
33. A vector comprising the polynucleotide of paragraph 31.
34. A cell comprising an editing construct of any of paragraphs 12-26.
35. A cell comprising a ribozyme of any of paragraphs 1-11.
36. A pharmaceutical composition comprising a ribozyme of any of paragraphs 1-11, an editing construct of any of paragraphs 12-26, or a vector of any of paragraphs 32-33.
37. A method for introducing a new nucleobase pair into a target site of a DNA molecule, comprising contacting a single-stranded R-loop formed in the DNA molecule by a bound napDNAbp with an engineered ribozyme, wherein the engineered ribozyme is configured to insert a nucleobase into an insertion site located in the R-loop.
38. The method of paragraph 37, wherein DNA repair and/or replication of a cell process the nucleobase insertion to form the new nucleobase pair in the DNA molecule.
39. The method of paragraph 37, wherein the engineered ribozyme is represented by the structure of FIG. 1A.
40. The method of paragraph 37, wherein the engineered ribozyme is represented by the structure of FIG. 3B.
41. The method of paragraph 37, wherein the engineered ribozyme comprises a deletion in the 3′ terminal end sufficient to remove the self-insertion activity of the ribozyme.
42. The method of paragraph 37, wherein the engineered ribozyme comprises an active site that catalyzes the insertion of the nucleobase.
43. The method of paragraph 37, wherein the engineered ribozyme comprises an active site having a region that hybridizes to the single-stranded R-loop.
44. The method of paragraph 37, wherein the engineered ribozyme comprises a nucleotide that forms a wobble base pair with the single-stranded R-loop.
45. The method of paragraph 37, wherein the engineered ribozyme comprises an unpaired nucleotide.
46. The method of paragraph 37, wherein the engineered ribozyme comprises an active site comprising in a 5′-3′ direction a region that hybridizes to the single-stranded R-loop, a nucleotide that forms a wobble base pair with the single-stranded R-loop, and an unpaired nucleotide.
47. The method of paragraph 37, wherein the ribozyme inserts the nucleobase immediate adjacent a wobble base pair formed between the ribozyme and the single-stranded R-loop.
48. The method of paragraph 37, wherein the ribozyme further comprises a targeting moiety.
49. The method of paragraph 48, wherein the targeting moiety is an MS2 hairpin structure.
50. The method of paragraph 37, wherein the ribozyme and the napDNAbp are not fusion proteins.
51. The method of paragraph 37, wherein the napDNAbp further comprises a targeting moiety receptor capable of binding to a ribozyme comprising a cognate targeting moiety.
52. The method of paragraph 37, wherein the napDNAbp is a Cas9 protein or functional equivalent thereof.
53. The method of paragraph 37, wherein the napDNAbp is a nuclease active Cas9, a nuclease inactive Cas9 (dCas9), or a Cas9 nickase (nCas9).
54. The method of paragraph 37, wherein the napDNAbp is selected from the group consisting of: Cas9, Cas12e, Cas12d, Cas12a, Cas12b1, Cas13a, Cas12c, and Argonaute and optionally has a nickase activity.
55. An engineered ribozyme comprising SEQ ID NO: 88, or a ribozyme comprising a nucleotide sequence that is at least 85%, at least 90%, at least 91%, at least 92%, at least 93%, at least 94%, at least 95%, at least 96%, at least 97%, at least 98%, at least 99%, or at least 99.5% identical to SEQ ID NO: 88.
56. An engineered ribozyme comprising SEQ ID NO: 89, or a ribozyme comprising a nucleotide sequence that is at least 85%, at least 90%, at least 91%, at least 92%, at least 93%, at least 94%, at least 95%, at least 96%, at least 97%, at least 98%, at least 99%, or at least 99.5% identical to SEQ ID NO: 89.
57. An engineered ribozyme comprising SEQ ID NO: 156, or a ribozyme comprising a nucleotide sequence that is at least 85%, at least 90%, at least 91%, at least 92%, at least 93%, at least 94%, at least 95%, at least 96%, at least 97%, at least 98%, at least 99%, or at least 99.5% identical to SEQ ID NO: 156.
58. An engineered ribozyme comprising SEQ ID NO: 157, or a ribozyme comprising a nucleotide sequence that is at least 85%, at least 90%, at least 91%, at least 92%, at least 93%, at least 94%, at least 95%, at least 96%, at least 97%, at least 98%, at least 99%, or at least 99.5% identical to SEQ ID NO: 157.
59. A genome editing system comprising a nucleic acid programmable DNA binding protein (napDNAbp), a guide RNA, and a ribozyme.
60. The genome editing system of paragraph 59, wherein the ribozyme comprises any of SEQ ID NOs: 88, 89, 156, or 157, or a ribozyme having a sequence that is at least 85%, at least 90%, at least 91%, at least 92%, at least 93%, at least 94%, at least 95%, at least 96%, at least 97%, at least 98%, at least 99%, or at least 99.5% identical to any of SEQ ID NOs: 88, 89, 156, or 157.
61. The genome editing system of paragraph 59, wherein the ribozyme is capable of inserting one or more nucleotides at the target site.
62. The genome editing system of paragraph 61, wherein the one or more nucleotides is a G or A.
63. The genome editing system of paragraph 61, wherein the one or more nucleotides is a C or T.
64. The genome editing system of paragraph 59, wherein the napDNAbp is a Cas9 protein or functional equivalent thereof.
65. The genome editing system of paragraph 59, wherein the napDNAbp is a nuclease active Cas9, a nuclease inactive Cas9 (dCas9), or a Cas9 nickase (nCas9).
66. The genome editing system of paragraph 59, wherein the napDNAbp is selected from the group consisting of: Cas9, Cas12e, Cas12d, Cas12a, Cas12b1, Cas13a, Cas12c, and Argonaute and optionally has a nickase activity.
67. The genome editing system of paragraph 59, wherein the napDNAbp comprises a recruitment domain.
68. The genome editing system of paragraph 67, wherein the recruitment domain is a MS2 bacteriophage coat protein.
69. The genome editing system of paragraph 67, wherein the MS2 bacteriophage coat protein comprises SEQ ID NO: 94, or an amino acid sequence having at least 85%, at least 90%, at least 91%, at least 92%, at least 93%, at least 94%, at least 95%, at least 96%, at least 97%, at least 98%, at least 99%, or at least 99.5% sequence identity with SEQ ID NO: 94.
70. The genome editing system of paragraph 67, wherein the ribozyme comprises the SEQ ID NO: 89, or a ribozyme having a sequence that is at least 85%, at least 90%, at least 91%, at least 92%, at least 93%, at least 94%, at least 95%, at least 96%, at least 97%, at least 98%, at least 99%, or at least 99.5% identical to any of SEQ ID NOs: 89.
71. The genome editing system of paragraph 67, wherein the ribozyme comprises the SEQ ID NO: 157, or a ribozyme having a sequence that is at least 85%, at least 90%, at least 91%, at least 92%, at least 93%, at least 94%, at least 95%, at least 96%, at least 97%, at least 98%, at least 99%, or at least 99.5% identical to any of SEQ ID NOs: 157.
72. The genome editing system of paragraph 59, wherein the napDNAbp comprise an additional one or more functional domains.
73. The genome editing system of paragraph 72, wherein the one or more functional domains is an NLS.
74. The genome editing system of paragraph 72, wherein the one or more functional domains is an intein or a split-intein.
75. The genome editing system of paragraph 72, wherein the one or more functional domains are coupled via one or more linkers.
76. The genome editing system of paragraph 73, wherein the NLS comprises SEQ ID NOs: 9, 118, 10, 119, or 121-126, or an amino acid sequence having at least 85%, at least 90%, at least 91%, at least 92%, at least 93%, at least 94%, at least 95%, at least 96%, at least 97%, at least 98%, at least 99%, or at least 99.5% sequence identity to any of SEQ ID NOs: 9, 118, 10, 119, or 121-126.
77. The genome editing system of paragraph 74, wherein the intein or split-intein comprises SEQ ID NOs: 1-8, or an amino acid sequence having at least 85%, at least 90%, at least 91%, at least 92%, at least 93%, at least 94%, at least 95%, at least 96%, at least 97%, at least 98%, at least 99%, or at least 99.5% sequence identity to any of SEQ ID NOs: 1-8.
78. The genome editing system of paragraph 75, wherein the linker comprises SEQ ID NOs: 102-113, or an amino acid sequence having at least 85%, at least 90%, at least 91%, at least 92%, at least 93%, at least 94%, at least 95%, at least 96%, at least 97%, at least 98%, at least 99%, or at least 99.5% sequence identity to any of SEQ ID NOs: 102-113.
79. The genome editing system of paragraph 59, wherein the napDNAbp when complexed with the guide RNA functions to bind to a target site in a DNA molecule, forming an R-loop.
80. The genome editing system of paragraph 79, wherein the R-loop comprises a single strand DNA region comprising a complementary region that binds to the ribozyme.
81. The genome editing system of paragraph 80, wherein the complementary region binds to the P0 site of the ribozyme.
82. One or more polynucleotides encoding the genome editing system of any of paragraphs 59-81.
83. A vector comprising the polynucleotide of paragraph 82.
84. The vector of paragraph 83, wherein the vector an rAAV.
85. The vector of paragraph 84, wherein the rAAV is an rAAV2, rAAV6, rAAV8, rPHP.B, rPHP.eB, or rAAV9.
86. A cell comprising the vector of any of paragraphs 83-85.
87. A pharmaceutical composition comprising a genome editing system of any of paragraphs 59-81, a polynucleotide of paragraph 82, or a vector of paragraphs 83-85, and a pharmaceutically acceptable excipient.
88. A method for installing one or more nucleobases at a target site in a DNA sequence, comprising contacting the DNA sequence with a genome editing system of any of paragraphs 59-80.
89. The method of paragraph 88, wherein the genome editing system comprises a nucleic acid programmable DNA binding protein (napDNAbp), a guide RNA, and a ribozyme.
90. The method of paragraph 89, wherein the ribozyme comprises any of SEQ ID NOs: 88, 89, 156, or 157, or a ribozyme having a sequence that is at least 85%, at least 90%, at least 91%, at least 92%, at least 93%, at least 94%, at least 95%, at least 96%, at least 97%, at least 98%, at least 99%, or at least 99.5% identical to any of SEQ ID NOs: 88, 89, 156, or 157.
91. The method of paragraph 89, wherein the ribozyme is capable of inserting one or more nucleotides at the target site.
92. The method of paragraph 88, wherein the method installs a G, A, T, or C, or a combination thereof.
93. The method of paragraph 88, wherein the method installs a frameshift mutation.
94. The method of paragraph 89, wherein the napDNAbp is a Cas9 protein or functional equivalent thereof.
95. The method of paragraph 89, wherein the napDNAbp is a nuclease active Cas9, a nuclease inactive Cas9 (dCas9), or a Cas9 nickase (nCas9).
96. The method of paragraph 89, wherein the napDNAbp is selected from the group consisting of: Cas9, Cas12e, Cas12d, Cas12a, Cas12b1, Cas13a, Cas12c, and Argonaute and optionally has a nickase activity.
97. The method of paragraph 89, wherein the napDNAbp comprises a recruitment domain.
98. The method of paragraph 89, wherein the recruitment domain is a MS2 bacteriophage coat protein.
99. The method of paragraph 98, wherein the MS2 bacteriophage coat protein comprises SEQ ID NO: 94, or an amino acid sequence having at least 85%, at least 90%, at least 91%, at least 92%, at least 93%, at least 94%, at least 95%, at least 96%, at least 97%, at least 98%, at least 99%, or at least 99.5% sequence identity with SEQ ID NO: 94.
100. The method of paragraph 98, wherein the ribozyme comprises the SEQ ID NO: 89, or a ribozyme having a sequence that is at least 85%, at least 90%, at least 91%, at least 92%, at least 93%, at least 94%, at least 95%, at least 96%, at least 97%, at least 98%, at least 99%, or at least 99.5% identical to any of SEQ ID NOs: 89.
101. The method of paragraph 98, wherein the ribozyme comprises the SEQ ID NO: 157, or a ribozyme having a sequence that is at least 85%, at least 90%, at least 91%, at least 92%, at least 93%, at least 94%, at least 95%, at least 96%, at least 97%, at least 98%, at least 99%, or at least 99.5% identical to any of SEQ ID NOs: 157.
102. An engineered ribozyme that catalyzes the insertion of a nucleotide into a single-stranded DNA molecule.
103. The engineered ribozyme of paragraph 102, wherein the nucleotide is G.
104. The engineered ribozyme of paragraph 102, wherein the nucleotide is A.
105. The engineered ribozyme of paragraph 102, wherein the nucleotide is T.
106. The engineered ribozyme of paragraph 102, wherein the nucleotide is C.

### BRIEF DESCRIPTION OF THE DRAWINGS

[0015] The following drawings form part of the present specification and are included to further demonstrate certain embodiments of the present disclosure, which can be better understood by reference to one or more of these drawings in combination with the detailed description of specific embodiments presented herein.

[0016] FIG. 1A shows the sequence and secondary structure of (a) an exemplary engineered ribozyme based on the ribozyme of Tetrahymena group I intron with mutations identified in directed evolution that enable the ribozyme to bind and cleave ssDNA (blue and/or indicated with a “star”) and insertions and deletions that enable nucleotide (e.g., GTP) insertion (red boxes). For example, element (b) refers to the deletion of the terminal nucleotides (e.g., the terminal 4 nucleotides) of the ribozyme, which inactivates the self-insertion activity of the ribozyme for self-insertion into the DNA target or substrate with which the ribozyme is interacting. This is also shown in more details in FIG. 3B. Element (c) shows engineered changes in the active site which interacts with the substrate DNA, catalyzing the insertion of the nucleotide at the target site of the target DNA substrate. Element (d) refers to the location or site of insertion of an MS2 hairpin (AUCUU sequence is removed and replaced with the MS2 hairpin), which functions as a targeting moiety to localize the engineered ribozyme to a bound napDNAbp/guide RNA complex to a target DNA site, wherein the napDNAbp is modified to incorporate a cognate targeting moiety receptor.

[0017] FIG. 1B shows the mechanism of group I intron-catalyzed splicing.

[0018] FIG. 2A is a schematic showing the targeted repair of frameshifts via single-nucleotide insertion into genomic DNA enabled by a ribozyme and Cas9-based molecular machine. In reference to FIG. 2A and also the detailed illustration of FIG. 2D, binding of the sgRNA:Cas9 complex to genomic DNA forms a ssDNA R-loop opposite the strand occupied by the guide RNA. The engineered e ribozyme (“group I insertase” as provided in this illustration in trans) then binds to its single strand DNA substrate, whereby a portion of the ribozyme (e.g., the P0 region) anneals to the single strand DNA of the R loop over a short complementary (or partly complementary) sequence (e.g., at least a 3, at least a 4, at least a 5, at least a 6, at least a 7, at least a 8, at least a 9, at least a 10, at least an 11, at least a 12, at least a 13, at least a 14, or at least a 15 nucleotide stretch in the R loop region). Once hybridized to the R loop at the complementary region, the ribozyme installs a nick in the R loop strand, and then catalyzes the insertion of a G into the nick site, and finally, the ligation between the newly inserted G and the adjacent nucleotide (here, T).

[0019] FIG. 2B shows the structure of the active site of the Azoarcus group I intron (top) and T7 DNA polymerase.

[0020] FIG. 2C shows the design of shifting strategy to enable the ribozyme to ligate the nick that results from GTP insertion, based on the structures in FIG. 1C.

[0021] FIG. 2D shows the design of extended P0 to enable ligation of GTP in ssDNA.

[0022] FIG. 3A depicts ribozyme-catalyzed insertion and ligation of GTP into ssDNA, as shown via polyacrylamide gel electro-phoresis (PAGE) analysis of 5′-radiolabeled DNA substrate (left) and high-throughput sequencing (HTS, right). NR indicates no reaction, P product alone, and +E the addition of the ribozyme in FIG. 1A.

[0023] FIG. 3B shows the design features of an (a) exemplary engineered ribozyme contemplated herein. The element identified as (b) represents the backbone portion of an exemplary engineered ribozyme, which can include the nucleotides in FIG. 1A identified with a “star” symbol, which enable the ribozyme to bind and act on DNA, as opposed to a natural RNA substrate. Examples of such modifications can be found described in Joyce et al., “Selection in vitro of an RNA enzyme that specifically cleaves single-stranded DNA,” Nature, 1990, p. 467, which is incorporated herein by reference. Element (c) refers to the deletion of the terminal nucleotides (e.g., the terminal 4 nucleotides) of the ribozyme, which inactivates or removes the self-insertion activity of the ribozyme for self-insertion into the DNA target or substrate with which the ribozyme is interacting. Element (d) refers to a GTP (nucleotide) substrate, which is inserted by the ribozyme into the DNA at the insertion site between elements (h) and (i) to change the sequence from GATCTGGG-5′ to GAGTCTGGG-5′. Without being bound by theory, and in reference to the stepwise mechanism of FIG. 2D, insertion would result in the breakage of the phosphodiester bond between the A and T nucleotides in the DNA substrate, inserting of a G from the GTP at the insertion site through formation of a phosphiester bond between the inserted G and the existing A on the DNA strand. The downstream A-G- would then shift such that the G would hybridize to the unpaired C in the ribozyme (the C located at element (g)), causing at the same time the pairing of the inserted G with the U on the ribozyme in element (h). Lastly, the ribozyme would catalyze the ligation of the introduced G to the upstream T in element (i), thereby introducing a G into the target DNA sequence. Through subsequent DNA repair and/or replication processes, a complete nucleobase pair will have been inserted/incorporated into the double strand DNA target.

[0024] Element (d) can preferably be a GTP or an ATP. In some embodiments, element (d) can be a TTP or a CTP. Element (e) refers to G nucleotides which facilitate effective transcription of the ribozyme. Element (f) refers to an extension of the P0 region of the ribozyme, which improves the binding of the substrate DNA to the ribozyme (e.g., as described further in Tsang and Joyce, “Specialization of the DNA-cleaving activity of a group I ribozyme through in vitro evolution,” J. Mol. Biol., 1996, 262(1):31-42, which is incorporated herein by reference). The length of this region can vary, e.g., can be from about 1-10 nucleobase pairs, or 2-12 nucleobase pairs, or 3-13 nucleobase pairs, or 4-14 nucleobase pairs, or from 5-20 nucleobase pairs. Element (g) is an unpaired nucleotide, which results in fewer required purines of element (h) needed to shift the substrate sequences upon insertion of the new nucleotide (e.g., GTP). In the example shown is an unpaired C, however this can be G, A, or T, in some embodiments.

[0025] Element (h) is a series of pyrimidine-purine nucleobase pairs (e.g., can be 1, 2, 3, 4, or 5 or more U-G, U-A, or C-G nucleobase pairs) that sit adjacent to the “wobble” nucleobase pair of element (i). The nucleobases of element (h) function to enable shifting in the active site of the ribozyme upon insertion of the nucleotide of element (d) (e.g., the GTP). The nucleobases of element (h) also enable the ligation step at the nick site formed subsequent or simultaneous to the GTP insertion (i.e., or another nucleotide of element (d)). Element (i) is a “wobble” nucleobase pair. In the example, the wobble nucleobase is a G-T pair, but other wobble pairs are acceptable. Element (j) represents the region of the active site which recognizes the DNA substrate (i.e., the target sequence). The region shown has the sequence 5′-GGACCC-3′, which is exemplary. This sequence can be represented more broadly at 5′-SSSWST-3′, wherein S is G or C and W is A or T.

[0026] The “active” site of the ribozyme for purposes of this disclosure can comprise elements (i) and (h). More broadly, the “active” site may refer to regions (g), (h), (i), and (j) since all four regions are involved in different aspects of the mechanism of insertion by the ribozyme. In general, element (j) binds and interacts with the target DNA substrate, element (i) is a “wobble” pair that helps define the location of the insertion point as between element (i) and (h), element (h) facilitates the upward (i.e., in the 5′ to 3′ direction, i.e., downstream shifting) shifting of the DNA substrate following the breakage or nicking of the phosphodiester bond between elements (h) and (i) on the DNA substrate. Element (g) also facilitates the downstream shift of the nicked portion of the DNA substrate (due to the interaction of the C on the ribozyme and the G on the DNA), making room for insertion of the G into the nicked site, and the subsequent ligation of that nucleotide to reform the DNA now-modified +1 nucleotide DNA substrate.

[0027] FIG. 3C depicts graphs showing that extended, bulged P0 results in improved ratio of desired product to cleaved intermediates, as determined by PAGE without a large loss in activity.

[0028] FIG. 4 shows a model for ribozyme-mediated programmable editing which is implemented with two Cas9:guide RNA complexes that bind on either side of a ribozyme binding site. In particular, the model shows Cas9- and ribozyme-mediated nucleotide insertion in dsDNA in vitro. Two Cas9:sgRNA complexes are targeted to either side of the ribozyme binding site, and the targeted strand bound to the sgRNA is nicked, resulting in dissociation of the intervening sequence to form a single strand DNA (ssDNA) region. The resulting ssDNA is able to be recognized by the ribozyme, and nucleotide insertion occurs, as shown in FIG. 2D or FIG. 3B.

[0029] FIG. 5A shows HTS analysis of nucleotide insertion reactions following incubation with catalytically inert Cas9 (dCa9) and ribozyme. Distances D1 and D2 indicate number of nucleotides between the ribozyme target site and either the 3′ or 5′ PAM recognized by Cas9, as shown in FIG. 4A.

[0030] FIG. 5B shows HTS analysis of nucleotide insertion reactions with substrates with a single nick in the target dsDNA.

[0031] FIG. 5C shows HTS analysis of nucleotide insertion reactions with substrates with two nicks in the target dsDNA.

[0032] FIG. 6A shows a scheme for indel formation following ribozyme- and Cas9-catalyzed strand cleavage. Cleavage of opposing strands in close proximity creates a staggered double-strand break, leading to error prone non-homologous or microhomology-mediated end-joining (NHEJ/MMEJ), resulting in stochastic insertions or deletions.

[0033] FIG. 6B shows HTS analysis of HEK293T cells transfected with plasmids encoding ribozyme, sgRNA, and Cas9 bearing a D10A mutation that inactivates the RuvC domain (nCas9), resulting in nicking of the target strand as opposed to double-strand break. Transfection of neither nCas9 alone nor in conjunction with ribozyme results in double-strand breaks.

[0034] FIG. 7A is an illustration showing enhanced targeting of ribozyme to genomic locus bound by Cas9 via fusion of the MS2 bacteriophage coat protein to Cas9 and incorporation of the MS2 RNA hairpin into the ribozyme.

[0035] FIG. 7B is an illustration showing MS2 hairpins installed in the L6 loop (grey) of the modified group I intron. Three different versions of the MS2 handle were constructed, varying the number of MS2 hairpins and the length and sequence of the linker between both them and the ribozyme core.

[0036] FIG. 7C shows HTS analysis of HEK293T cells transfected with plasmids encoding various MS2-ribozymes, MS2-fused nCas9, and sgRNA targeted to the HEK4 genomic locus.

[0037] FIG. 7D shows HTS analysis of HEK293T cells transfected as in E, targeted to another genomic locus. In both cases, significant ac-cumulation of indels are observed, indicative of ribozyme cutting activity.

[0038] FIG. 8 provides an illustration of a selection scheme for ribozymes that perform DNA cleavage. See Beaudry & Joyce, Science 1992.

[0039] FIG. 9 is a schematic showing that ribozymes can insert a single nucleotide into DNA in bacteria. (Top) illustration of relevant plasmids expressing the ribozyme and Cas9 upon being induced with L-arabinose. (Middle) Scheme showing DNA target site and portions of the DNA which would basepair to either the guide or ribozyme. The PAM is also shown. (Bottom) Sanger sequencing results of bacteria that survived on kanamycin following ribozyme/Cas9 expression. All colonies contained the inserted G that would be expected if the ribozyme were functioning as designed.

### DEFINITIONS

[0040] Unless defined otherwise, all technical and scientific terms used herein have the meaning commonly understood by one of ordinary skill in the art to which this invention belongs. The following references provide one of skill in the art to which this invention pertains with a general definition of many of the terms used in this invention: Singleton et al., Dictionary of Microbiology and Molecular Biology (2d ed. 1994); The Cambridge Dictionary of Science and Technology (Walker ed., 1988); Hale & Marham, The Harper Collins Dictionary of Biology (1991); and Lackie et al., The Dictionary of Cell & Molecular Biology (3d ed. 1999); and Cellular and Molecular Immunology, Eds. Abbas, Lichtman and Pober, 2nd Edition, W.B. Saunders Company. For the purposes of the present invention, the following terms are further defined.

### Antisense Strand

[0041] In genetics, the “antisense” strand of a segment within double-stranded DNA is the template strand, and which is considered to run in the 3′ to 5′ orientation. By contrast, the “sense” strand is the segment within double-stranded DNA that runs from 5′ to 3′, and which is complementary to the antisense strand of DNA, or template strand, which runs from 3′ to 5′. In the case of a DNA segment that encodes a protein, the sense strand is the strand of DNA that has the same sequence as the mRNA, which takes the antisense strand as its template during transcription, and eventually undergoes (typically, not always) translation into a protein. The antisense strand is thus responsible for the RNA that is later translated to protein, while the sense strand possesses a nearly identical makeup to that of the mRNA. Note that for each segment of dsDNA, there will possibly be two sets of sense and antisense, depending on which direction one reads (since sense and antisense is relative to perspective). It is ultimately the gene product, or mRNA, that dictates which strand of one segment of dsDNA is referred to as sense or antisense.

### Bi-Specific Ligand

[0042] The term “bi-specific ligand” or “bi-specific moiety,” as used herein, refers to a ligand that binds to two different ligand-binding domains. In certain embodiments, the ligand is a small molecule compound, or a peptide, or a polypeptide. In other embodiments, ligand-binding domain is a “dimerization domain,” which can be install as a peptide tag onto a protein. In various embodiments, two proteins each comprising the same or different dimerization domains can be induced to dimerize through the binding of each dimerization domain to the bi-specific ligand. As used herein, “bi-specific ligands” may be equivalently refer to “chemical inducers of dimerization” or “CIDs”. In one embodiment, a napDNAbp or guide RNA modified to comprise a first dimerization domain can be used to recruit a ribozyme comprising a second dimerization domain via their coupling through a bi-specific ligand.

cDNA

[0043] The term “cDNA” refers to a strand of DNA copied from an RNA template. cDNA is complementary to the RNA template.

### Circular Permutant

[0044] As used herein, the term “circular permutant” refers to a protein or polypeptide (e.g., a Cas9) comprising a circular permutation, which is change in the protein's structural configuration involving a change in order of amino acids appearing in the protein's amino acid sequence. In other words, circular permutants are proteins that have altered N- and C-termini as compared to a wild-type counterpart, e.g., the wild-type C-terminal half of a protein becomes the new N-terminal half. Circular permutation (or CP) is essentially the topological rearrangement of a protein's primary sequence, connecting its N- and C-terminus, often with a peptide linker, while concurrently splitting its sequence at a different position to create new, adjacent N- and C-termini. The result is a protein structure with different connectivity, but which often can have the same overall similar three-dimensional (3D) shape, and possibly include improved or altered characteristics, including, reduced proteolytic susceptibility, improved catalytic activity, altered substrate or ligand binding, and/or improved thermostability. Circular permutant proteins can occur in nature (e.g., concanavalin A and lectin). In addition, circular permutation can occur as a result of posttranslational modifications or may be engineered using recombinant techniques.

### Circularly Permuted Cas9

[0045] The term “circularly permuted Cas9” refers to any Cas9 protein, or variant thereof, that has been occurs as a circular permutant, whereby its N- and C-termini have been topically rearranged. Such circularly permuted Cas9 proteins (“CP-Cas9”), or variants thereof, retain the ability to bind DNA when complexed with a guide RNA (gRNA). See, Oakes et al., “Protein Engineering of Cas9 for enhanced function,” Methods Enzymol, 2014, 546: 491-511 and Oakes et al., “CRISPR-Cas9 Circular Permutants as Programmable Scaffolds for Genome Modification,” Cell, Jan. 10, 2019, 176: 254-267, each of are incorporated herein by reference. The instant disclosure contemplates any previously known CP-Cas9 or use a new CP-Cas9 so long as the resulting circularly permuted protein retains the ability to bind DNA when complexed with a guide RNA (gRNA). Exemplary CP-Cas9 proteins are SEQ ID NOs: 67-76.

### CRISPR

[0046] CRISPR is a family of DNA sequences (i.e., CRISPR clusters) in bacteria and archaea that represent snippets of prior infections by a virus that have invaded the prokaryote. The snippets of DNA are used by the prokaryotic cell to detect and destroy DNA from subsequent attacks by similar viruses and effectively compose, along with an array of CRISPR-associated proteins (including Cas9 and homologs thereof) and CRISPR-associated RNA, a prokaryotic immune defense system. In nature, CRISPR clusters are transcribed and processed into CRISPR RNA (crRNA). In certain types of CRISPR systems (e.g., type II CRISPR systems), correct processing of pre-crRNA requires a trans-encoded small RNA (tracrRNA), endogenous ribonuclease 3 (mc) and a Cas9 protein. The tracrRNA serves as a guide for ribonuclease 3-aided processing of pre-crRNA. Subsequently, Cas9/crRNA/tracrRNA endonucleolytically cleaves linear or circular dsDNA target complementary to the RNA. Specifically, the target strand not complementary to crRNA is first cut endonucleolytically, then trimmed 3′-5′ exonucleolytically. In nature, DNA-binding and cleavage typically requires protein and both RNAs. However, single guide RNAs (“sgRNA”, or simply “gNRA”) can be engineered so as to incorporate aspects of both the crRNA and tracrRNA into a single RNA species—the guide RNA. See, e.g., Jinek M., Chylinski K., Fonfara I., Hauer M., Doudna J. A., Charpentier E. Science 337:816-821(2012), the entire contents of which is hereby incorporated by reference. Cas9 recognizes a short motif in the CRISPR repeat sequences (the PAM or protospacer adjacent motif) to help distinguish self versus non-self. CRISPR biology, as well as Cas9 nuclease sequences and structures are well known to those of skill in the art (see, e.g., “Complete genome sequence of an M1 strain of Streptococcus pyogenes.” Ferretti et al., J. J., McShan W. M., Ajdic D. J., Savic D. J., Savic G., Lyon K., Primeaux C., Sezate S., Suvorov A. N., Kenton S., Lai H. S., Lin S. P., Qian Y., Jia H. G., Najar F. Z., Ren Q., Zhu H., Song L., White J., Yuan X., Clifton S. W., Roe B. A., McLaughlin R. E., Proc. Natl. Acad. Sci. U.S.A. 98:4658-4663(2001); “CRISPR RNA maturation by trans-encoded small RNA and host factor RNase III.” Deltcheva E., Chylinski K., Sharma C. M., Gonzales K., Chao Y., Pirzada Z. A., Eckert M. R., Vogel J., Charpentier E., Nature 471:602-607(2011); and “A programmable dual-RNA-guided DNA endonuclease in adaptive bacterial immunity.” Jinek M., Chylinski K., Fonfara I., Hauer M., Doudna J. A., Charpentier E. Science 337:816-821(2012), the entire contents of each of which are incorporated herein by reference). Cas9 orthologs have been described in various species, including, but not limited to, S. pyogenes and S. thermophilus. Additional suitable Cas9 nucleases and sequences will be apparent to those of skill in the art based on this disclosure, and such Cas9 nucleases and sequences include Cas9 sequences from the organisms and loci disclosed in Chylinski, Rhun, and Charpentier, “The tracrRNA and Cas9 families of type II CRISPR-Cas immunity systems” (2013) RNA Biology 10:5, 726-737; the entire contents of which are incorporated herein by reference.

### Dimerization Domain

[0047] The term “dimerization domain” refers to a ligand-binding domain that binds to a binding moiety of a bi-specific ligand. A “first” dimerization domain binds to a first binding moiety of a bi-specific ligand and a “second” dimerization domain binds to a second binding moiety of the same bi-specific ligand. When the first dimerization domain is fused to a first protein (e.g., via PE, as discussed herein) and the second dimerization domain (e.g., via PE, as discussed herein) is fused to a second protein, the first and second protein dimerize in the presence of a bi-specific ligand, wherein the bi-specific ligand has at least one moiety that binds to the first dimerization domain and at least another moiety that binds to the second dimerization domain. In one embodiment, a napDNAbp or guide RNA modified to comprise a first dimerization domain can be used to recruit a ribozyme comprising a second dimerization domain via their coupling through a bi-specific ligand.

### Downstream

[0048] As used herein, the terms “upstream” and “downstream” are terms of relativity that define the linear position of at least two elements located in a nucleic acid molecule (whether single or double-stranded) that is orientated in a 5′-to-3′ direction. In particular, a first element is upstream of a second element in a nucleic acid molecule where the first element is positioned somewhere that is 5′ to the second element. For example, a SNP is upstream of a Cas9-induced nick site if the SNP is on the 5′ side of the nick site. Conversely, a first element is downstream of a second element in a nucleic acid molecule where the first element is positioned somewhere that is 3′ to the second element. For example, a SNP is downstream of a Cas9-induced nick site if the SNP is on the 3′ side of the nick site. The nucleic acid molecule can be a DNA (double or single stranded). RNA (double or single stranded), or a hybrid of DNA and RNA. The analysis is the same for single strand nucleic acid molecule and a double strand molecule since the terms upstream and downstream are in reference to only a single strand of a nucleic acid molecule, except that one needs to select which strand of the double stranded molecule is being considered. Often, the strand of a double stranded DNA which can be used to determine the positional relativity of at least two elements is the “sense” or “coding” strand. In genetics, a “sense” strand is the segment within double-stranded DNA that runs from 5′ to 3′, and which is complementary to the antisense strand of DNA, or template strand, which runs from 3′ to 5′. Thus, as an example, a SNP nucleobase is “downstream” of a promoter sequence in a genomic DNA (which is double-stranded) if the SNP nucleobase is on the 3′ side of the promoter on the sense or coding strand.

### Effective Amount

[0049] The term “effective amount,” as used herein, refers to an amount of a biologically active agent that is sufficient to elicit a desired biological response. For example, in some embodiments, an effective amount of the various components of the herein described compositions (e.g., the engineered ribozymes and/or napDNAbp complexes) may refer to the amount of the composition or its individual components that are sufficient to edit a target site nucleotide sequence, e.g., a genome (e.g., by installing a single base insertion or deletion, or to correct a frameshift mutation). As will be appreciated by the skilled artisan, the effective amount of an agent, e.g., a fusion protein, a nuclease, a hybrid protein, a protein dimer, a complex of a protein (or protein dimer) and a polynucleotide, or a polynucleotide, may vary depending on various factors as, for example, on the desired biological response, e.g., on the specific allele, genome, or target site to be edited, on the cell or tissue being targeted, and on the agent being used.

### Frameshift Mutation

[0050] As used herein, a “frameshift mutation” is a deletion or addition of 1, 2, or 4 nucleotides that change the ribosome reading frame and cause premature termination of translation at a new nonsense or chain termination codon (TAA, TAG, and TGA). Likewise, insertions, deletions, and point mutations can all generate a nonsense codon mutation, directly stopping translation. Functional equivalent

[0051] The term “functional equivalent” refers to a second biomolecule that is equivalent in function, but not necessarily equivalent in structure to a first biomolecule. For example, a “Cas9 equivalent” refers to a protein that has the same or substantially the same functions as Cas9, but not necessarily the same amino acid sequence. In the context of the disclosure, the specification refers throughout to “a protein X, or a functional equivalent thereof.” In this context, a “functional equivalent” of protein X embraces any homolog, paralog, fragment, naturally occurring, engineered, mutated, or synthetic version of protein X which bears an equivalent function.

### Fusion Protein

[0052] The term “fusion protein” as used herein refers to a hybrid polypeptide which comprises protein domains from at least two different proteins. One protein may be located at the amino-terminal (N-terminal) portion of the fusion protein or at the carboxy-terminal (C-terminal) protein thus forming an “amino-terminal fusion protein” or a “carboxy-terminal fusion protein,” respectively. A protein may comprise different domains, for example, a nucleic acid binding domain (e.g., the gRNA binding domain of Cas9 that directs the binding of the protein to a target site) and a nucleic acid cleavage domain or a catalytic domain of a nucleic-acid editing protein. Another example includes a Cas9 or equivalent thereof to a reverse transcriptase. Any of the proteins provided herein may be produced by any method known in the art. For example, the proteins provided herein may be produced via recombinant protein expression and purification, which is especially suited for fusion proteins comprising a peptide linker. Methods for recombinant protein expression and purification are well known, and include those described by Green and Sambrook, Molecular Cloning: A Laboratory Manual (4^{th} ed., Cold Spring Harbor Laboratory Press, Cold Spring Harbor, N.Y. (2012)), the entire contents of which are incorporated herein by reference. For example, the genome editing system described herein may comprise a fusion protein between a napDNAbp and one or more other functional domains, such as, but not limited to a NLS.

### Guide RNA

[0053] As used herein, the term “guide RNA” is a particular type of guide nucleic acid which is mostly commonly associated with a Cas protein of a CRISPR-Cas9 and which associates with Cas9, directing the Cas9 protein to a specific sequence in a DNA molecule that includes complementarity to protospace sequence of the guide RNA. However, this term also embraces the equivalent guide nucleic acid molecules that associate with Cas9 equivalents, homologs, orthologs, or paralogs, whether naturally occurring or non-naturally occurring (e.g., engineered or recombinant), and which otherwise program the Cas9 equivalent to localize to a specific target nucleotide sequence. The Cas9 equivalents may include other napDNAbp from any type of CRISPR system (e.g., type II, V, VI), including Cpf1 (a type-V CRISPR-Cas systems), C2c1 (a type V CRISPR-Cas system), C2c2 (a type VI CRISPR-Cas system) and C2c3 (a type V CRISPR-Cas system). Further Cas-equivalents are described in Makarova et al., “C2c2 is a single-component programmable RNA-guided RNA-targeting CRISPR effector,” Science 2016; 353(6299), the contents of which are incorporated herein by reference. Exemplary sequences are and structures of guide RNAs are provided herein. In addition, methods for designing appropriate guide RNA sequences are provided herein. As used herein, the “guide RNA” may also be referred to as a “traditional guide RNA” to contrast it with the modified forms of guide RNA termed “extended guide RNAs” which have been invented for the TPRT editing methods and composition disclosed herein.

### Host Cell

[0054] The term “host cell,” as used herein, refers to a cell that can host, replicate, and express a vector described herein, e.g., a vector comprising a nucleic acid molecule encoding a fusion protein comprising a Cas9 or Cas9 equivalent and a reverse transcriptase.

### Inteins

[0055] As used herein, the term “intein” refers to auto-processing polypeptide domains found in organisms from all domains of life and can be used in the context of delivery a genome editing system of the disclosure by splitting the polypeptide elements into two or more small fragments, joinable in the cell by inteins and split-intein sequences.

[0056] An intein (intervening protein) carries out a unique auto-processing event known as protein splicing in which it excises itself out from a larger precursor polypeptide through the cleavage of two peptide bonds and, in the process, ligates the flanking extein (external protein) sequences through the formation of a new peptide bond. This rearrangement occurs post-translationally (or possibly co-translationally), as intein genes are found embedded in frame within other protein-coding genes. Furthermore, intein-mediated protein splicing is spontaneous; it requires no external factor or energy source, only the folding of the intein domain. This process is also known as cis-protein splicing, as opposed to the natural process of trans-protein splicing with “split inteins.” Inteins are the protein equivalent of the self-splicing RNA introns (see Perler et al., Nucleic Acids Res. 22:1125-1127 (1994)), which catalyze their own excision from a precursor protein with the concomitant fusion of the flanking protein sequences, known as exteins (reviewed in Perler et al., Curr. Opin. Chem. Biol. 1:292-299 (1997); Perler, F. B. Cell 92(1):1-4 (1998); Xu et al., EMBO J. 15(19):5146-5153 (1996)).

[0057] As used herein, the term “protein splicing” refers to a process in which an interior region of a precursor protein (an intein) is excised and the flanking regions of the protein (exteins) are ligated to form the mature protein. This natural process has been observed in numerous proteins from both prokaryotes and eukaryotes (Perler, F. B., Xu, M. Q., Paulus, H. Current Opinion in Chemical Biology 1997, 1, 292-299; Perler, F. B. Nucleic Acids Research 1999, 27, 346-347). The intein unit contains the necessary components needed to catalyze protein splicing and often contains an endonuclease domain that participates in intein mobility (Perler, F. B., Davis, E. O., Dean, G. E., Gimble, F. S., Jack, W. E., Neff, N., Noren, C. J., Thomer, J., Belfort, M. Nucleic Acids Research 1994, 22, 1127-1127). The resulting proteins are linked, however, not expressed as separate proteins. Protein splicing may also be conducted in trans with split inteins expressed on separate polypeptides spontaneously combine to form a single intein which then undergoes the protein splicing process to join to separate proteins.

[0058] The elucidation of the mechanism of protein splicing has led to a number of intein-based applications (Comb, et al., U.S. Pat. No. 5,496,714; Comb, et al., U.S. Pat. No. 5,834,247; Camarero and Muir, J. Amer. Chem. Soc., 121:5597-5598 (1999); Chong, et al., Gene, 192:271-281 (1997), Chong, et al., Nucleic Acids Res., 26:5109-5115 (1998); Chong, et al., J. Biol. Chem., 273:10567-10577 (1998); Cotton, et al. J. Am. Chem. Soc., 121:1100-1101 (1999); Evans, et al., J. Biol. Chem., 274:18359-18363 (1999); Evans, et al., J. Biol. Chem., 274:3923-3926 (1999); Evans, et al., Protein Sci., 7:2256-2264 (1998); Evans, et al., J. Biol. Chem., 275:9091-9094 (2000); Iwai and Pluckthun, FEBS Lett. 459:166-172 (1999); Mathys, et al., Gene, 231:1-13 (1999); Mills, et al., Proc. Natl. Acad. Sci. USA 95:3543-3548 (1998); Muir, et al., Proc. Natl. Acad. Sci. USA 95:6705-6710 (1998); Otomo, et al., Biochemistry 38:16040-16044 (1999); Otomo, et al., J. Biolmol. NMR 14:105-114 (1999); Scott, et al., Proc. Natl. Acad. Sci. USA 96:13638-13643 (1999); Severinov and Muir, J. Biol. Chem., 273:16205-16209 (1998); Shingledecker, et al., Gene, 207:187-195 (1998); Southworth, et al., EMBO J. 17:918-926 (1998); Southworth, et al., Biotechniques, 27:110-120 (1999); Wood, et al., Nat. Biotechnol., 17:889-892 (1999); Wu, et al., Proc. Natl. Acad. Sci. USA 95:9226-9231 (1998a); Wu, et al., Biochim Biophys Acta 1387:422-432 (1998b); Xu, et al., Proc. Natl. Acad. Sci. USA 96:388-393 (1999); Yamazaki, et al., J. Am. Chem. Soc., 120:5591-5592 (1998)). Each reference is incorporated herein by reference.

### Ligand-Dependent Intein

[0059] The term “ligand-dependent intein,” as used herein refers to an intein that comprises a ligand-binding domain. Typically, the ligand-binding domain is inserted into the amino acid sequence of the intein, resulting in a structure intein (N)—ligand-binding domain—intein (C). Typically, ligand-dependent inteins exhibit no or only minimal protein splicing activity in the absence of an appropriate ligand, and a marked increase of protein splicing activity in the presence of the ligand. In some embodiments, the ligand-dependent intein does not exhibit observable splicing activity in the absence of ligand but does exhibit splicing activity in the presence of the ligand. In some embodiments, the ligand-dependent intein exhibits an observable protein splicing activity in the absence of the ligand, and a protein splicing activity in the presence of an appropriate ligand that is at least 5 times, at least 10 times, at least 50 times, at least 100 times, at least 150 times, at least 200 times, at least 250 times, at least 500 times, at least 1000 times, at least 1500 times, at least 2000 times, at least 2500 times, at least 5000 times, at least 10000 times, at least 20000 times, at least 25000 times, at least 50000 times, at least 100000 times, at least 500000 times, or at least 1000000 times greater than the activity observed in the absence of the ligand. In some embodiments, the increase in activity is dose dependent over at least 1 order of magnitude, at least 2 orders of magnitude, at least 3 orders of magnitude, at least 4 orders of magnitude, or at least 5 orders of magnitude, allowing for fine-tuning of intein activity by adjusting the concentration of the ligand. Suitable ligand-dependent inteins are known in the art, and in include those provided below and those described in published U.S. Patent Application U.S. 2014/0065711 A1; Mootz et al., “Protein splicing triggered by a small molecule.” J. Am. Chem. Soc. 2002; 124, 9044-9045; Mootz et al., “Conditional protein splicing: a new tool to control protein structure and function in vitro and in vivo.” J. Am. Chem. Soc. 2003; 125, 10561-10569; Buskirk et al., Proc. Natl. Acad. Sci. USA. 2004; 101, 10505-10510); Skretas & Wood, “Regulation of protein activity with small-molecule-controlled inteins.” Protein Sci. 2005; 14, 523-532; Schwartz, et al., “Post-translational enzyme activation in an animal via optimized conditional protein splicing.” Nat. Chem. Biol. 2007; 3, 50-54; Peck et al., Chem. Biol. 2011; 18 (5), 619-630; the entire contents of each are hereby incorporated by reference. Exemplary sequences are as follows:

| NAME | SEQUENCE OF LIGAND-DEPENDENT INTEIN |
|---|---|
| 2-4 INTEIN: | CLAEGTRIFDPVTGTTHRIEDVVDGRKPIHVVAAAKDGTLLARPVV |
| | SWFDQGTRDVIGLRIAGGAIVWATPDHKVLTEYGWRAAGELRKGD |
| | RVAGPGGSGNSLALSLTADQMVSALLDAEPPILYSEYDPTSPFSEAS |
| | MMGLLTNLADRELVHMINWAKRVPGFVDLTLHDQAHLLECAWLEI |
| | LMIGLVWRSMEHPGKLLFAPNLLLDRNQGKCVEGMVEIFDMLLAT |
| | SSRFRMMNLQGEEFVCLKSIILLNSGVYTFLSSTLKSLEEKDHIHRA |
| | LDKITDTLIHLMAKAGLTLQQQHQRLAQLLLILSHIRHMSNKGMEH |
| | LYSMKYKNVVPLYDLLLEMLDAHRLHAGGSGASRVQAFADALDD |
| | KFLHDMLAEELRYSVIREVLPTRRARTFDLEVEELHTLVAEGVVVH |
| | NC (SEQ ID NO: 1) |
| 3-2 INTEIN | CLAEGTRIFDPVTGTTHRIEDVVDGRKPIHVVAVAKDGTLLARPVVS |
| | WFDQGTRDVIGLRIAGGAIVWATPDHKVLTEYGWRAAGELRKGDR |
| | VAGPGGSGNSLALSLTADQMVSALLDAEPPILYSEYDPTSPFSEASM |
| | MGLLTNLADRELVHMINWAKRVPGFVDLTLHDQAHLLECAWLEIL |
| | MIGLVWRSMEHPGKLLFAPNLLLDRNQGKCVEGMVEIFDMLLATS |
| | SRFRMMNLQGEEFVCLKSIILLNSGVYTFLSSTLKSLEEKDHIHRAL |
| | DKITDTLIHLMAKAGLTLQQQHQRLAQLLLILSHIRHMSNKGMEHL |
| | YSMKYTNVVPLYDLLLEMLDAHRLHAGGSGASRVQAFADALDDK |
| | FLHDMLAEELRYSVIREVLPTRRARTFDLEVEELHTLVAEGVVVHN |
| | C (SEQ ID NO: 2) |
| 30R3-1 INTEIN | CLAEGTRIFDPVTGTTHRIEDVVDGRKPIHVVAAAKDGTLLARPVV |
| | SWFDQGTRDVIGLRIAGGATVWATPDHKVLTEYGWRAAGELRKG |
| | DRVAGPGGSGNSLALSLTADQMVSALLDAEPPIPYSEYDPTSPFSEA |
| | SMMGLLTNLADRELVHMINWAKRVPGFVDLTLHDQAHLLECAWL |
| | EILMIGLVWRSMEHPGKLLFAPNLLLDRNQGKCVEGMVEIFDMLL |
| | ATSSRFRMMNLQGEEFVCLKSIILLNSGVYTFLSSTLKSLEEKDHIH |
| | RALDKITDTLIHLMAKAGLTLQQQHQRLAQLLLILSHIRHMSNKGM |
| | EHLYSMKYKNVVPLYDLLLEMLDAHRLHAGGSGASRVQAFADAL |
| | DDKFLHDMLAEGLRYSVIREVLPTRRARTFDLEVEELHTLVAEGVV |
| | VHNC (SEQ ID NO: 3) |
| 30R3-2 INTEIN | CLAEGTRIFDPVTGTTHRIEDVVDGRKPIHVVAAAKDGTLLARPVV |
| | SWFDQGTRDVIGLRIAGGATVWATPDHKVLTEYGWRAAGELRKG |
| | DRVAGPGGSGNSLALSLTADQMVSALLDAEPPILYSEYDPTSPFSEA |
| | SMMGLLTNLADRELVHMINWAKRVPGFVDLTLHDQAHLLECAWL |
| | EILMIGLVWRSMEHPGKLLFAPNLLLDRNQGKCVEGMVEIFDMLL |
| | ATSSRFRMMNLQGEEFVCLKSIILLNSGVYTFLSSTLKSLEEKDHIH |
| | RALDKITDTLIHLMAKAGLTLQQQHQRLAQLLLILSHIRHMSNKGM |
| | EHLYSMKYKNVVPLYDLLLEMLDAHRLHAGGSGASRVQAFADAL |
| | DDKFLHDMLAEELRYSVIREVLPTRRARTFDLEVEELHTLVAEGVV |
| | VHNC (SEQ ID NO: 4) |
| 30R3-3 INTEIN | CLAEGTRIFDPVTGTTHRIEDVVDGRKPIHVVAAAKDGTLLARPVV |
| | SWFDQGTRDVIGLRIAGGATVWATPDHKVLTEYGWRAAGELRKG |
| | DRVAGPGGSGNSLALSLTADQMVSALLDAEPPIPYSEYDPTSPFSEA |
| | SMMGLLTNLADRELVHMINWAKRVPGFVDLTLHDQAHLLECAWL |
| | EILMIGLVWRSMEHPGKLLFAPNLLLDRNQGKCVEGMVEIFDMLL |
| | ATSSRFRMMNLQGEEFVCLKSIILLNSGVYTFLSSTLKSLEEKDHIH |
| | RALDKITDTLIHLMAKAGLTLQQQHQRLAQLLLILSHIRHMSNKGM |
| | EHLYSMKYKNVVPLYDLLLEMLDAHRLHAGGSGASRVQAFADAL |
| | DDKFLHDMLAEELRYSVIREVLPTRRARTFDLEVEELHTLVAEGVV |
| | VHNC (SEQ ID NO: 5) |
| 37R3-1 INTEIN | CLAEGTRIFDPVTGTTHRIEDVVDGRKPIHVVAAAKDGTLLARPVV |
| | SWFDQGTRDVIGLRIAGGATVWATPDHKVLTEYGWRAAGELRKG |
| | DRVAGPGGSGNSLALSLTADQMVSALLDAEPPILYSEYNPTSPFSEA |
| | SMMGLLTNLADRELVHMINWAKRVPGFVDLTLHDQAHLLERAWL |
| | EILMIGLVWRSMEHPGKLLFAPNLLLDRNQGKCVEGMVEIFDMLL |
| | ATSSRFRMMNLQGEEFVCLKSIILLNSGVYTFLSSTLKSLEEKDHIH |
| | RALDKITDTLIHLMAKAGLTLQQQHQRLAQLLLILSHIRHMSNKGM |
| | EHLYSMKYKNVVPLYDLLLEMLDAHRLHAGGSGASRVQAFADAL |
| | DDKFLHDMLAEGLRYSVIREVLPTRRARTFDLEVEELHTLVAEGVV |
| | VHNC (SEQ ID NO: 6) |
| 37R3-2 INTEIN | CLAEGTRIFDPVTGTTHRIEDVVDGRKPIHVVAAAKDGTLLARPVV |
| | SWFDQGTRDVIGLRIAGGAIVWATPDHKVLTEYGWRAAGELRKGD |
| | RVAGPGGSGNSLALSLTADQMVSALLDAEPPILYSEYDPTSPFSEAS |
| | MMGLLTNLADRELVHMINWAKRVPGFVDLTLHDQAHLLERAWLEI |
| | LMIGLVWRSMEHPGKLLFAPNLLLDRNQGKCVEGMVEIFDMLLAT |
| | SSRFRMMNLQGEEFVCLKSIILLNSGVYTFLSSTLKSLEEKDHIHRA |
| | LDKITDTLIHLMAKAGLTLQQQHQRLAQLLLILSHIRHMSNKGMEH |
| | LYSMKYKNVVPLYDLLLEMLDAHRLHAGGSGASRVQAFADALDD |
| | KFLHDMLAEGLRYSVIREVLPTRRARTFDLEVEELHTLVAEGVVVH |
| | NC (SEQ ID NO: 7) |
| 37R3-3 INTEIN | CLAEGTRIFDPVTGTTHRIEDVVDGRKPIHVVAVAKDGTLLARPVVS |
| | WFDQGTRDVIGLRIAGGATVWATPDHKVLTEYGWRAAGELRKGD |
| | RVAGPGGSGNSLALSLTADQMVSALLDAEPPILYSEYDPTSPFSEAS |
| | MMGLLTNLADRELVHMINWAKRVPGFVDLTLHDQAHLLERAWLEI |
| | LMIGLVWRSMEHPGKLLFAPNLLLDRNQGKCVEGMVEIFDMLLAT |
| | SSRFRMMNLQGEEFVCLKSIILLNSGVYTFLSSTLKSLEEKDHIHRA |
| | LDKITDTLIHLMAKAGLTLQQQHQRLAQLLLILSHIRHMSNKGMEH |
| | LYSMKYKNVVPLYDLLLEMLDAHRLHAGGSGASRVQAFADALDD |
| | KFLHDMLAEELRYSVIREVLPTRRARTFDLEVEELHTLVAEGVVVH |
| | NC (SEQ ID NO: 8) |

napDNAbn

[0060] As used herein, the term “nucleic acid programmable DNA binding protein” or “napDNAbp,” of which Cas9 is an example, refer to a proteins which use RNA:DNA hybridization to target and bind to specific sequences in a DNA molecule. Each napDNAbp is associated with at least one guide nucleic acid (e.g., guide RNA), which localizes the napDNAbp to a DNA sequence that comprises a DNA strand (i.e., a target strand) that is complementary to the guide nucleic acid, or a portion thereof (e.g., the protospacer sequence of a guide RNA). In other words, the guide nucleic-acid “programs” the napDNAbp (e.g., Cas9 or equivalent) to localize and bind to a complementary sequence.

[0061] Without being bound by theory, the binding mechanism of a napDNAbp—guide RNA complex, in general, includes the step of forming an R-loop whereby the napDNAbp induces the unwinding of a double-strand DNA target, thereby separating the strands in the region bound by the napDNAbp. The guideRNA protospacer then hybridizes to the “target strand.” This displaces a “non-target strand” that is complementary to the target strand, which forms the single strand region of the R-loop. In some embodiments, the napDNAbp includes one or more nuclease activities, which then cut the DNA leaving various types of lesions. For example, the napDNAbp may comprises a nuclease activity that cuts the non-target strand at a first location, and/or cuts the target strand at a second location. Depending on the nuclease activity, the target DNA can be cut to form a “double-stranded break” whereby both strands are cut. In other embodiments, the target DNA can be cut at only a single site, i.e., the DNA is “nicked” on one strand. Exemplary napDNAbp with different nuclease activities include “Cas9 nickase” (“nCas9”) and a deactivated Cas9 having no nuclease activities (“dead Cas9” or “dCas9”). Exemplary sequences for these and other napDNAbp are provided herein.

### Nickase

[0062] The term “nickase” refers to a Cas9 with one of the two nuclease domains inactivated. This enzyme is capable of cleaving only one strand of a target DNA. For example, a Cas9 nickase may have an inactivating mutation in an HNH nuclease domain, but with an unaltered RuvC nuclease domain. In another example, a Cas9 nickase may have an unaltered HNH nuclease domain, but have an inactivating mutation in the RuvC nuclease domain.

### Nuclear Localization Sequence (NLS)

[0063] The term “nuclear localization sequence” or “NLS” refers to an amino acid sequence that promotes import of a protein into the cell nucleus, for example, by nuclear transport. Nuclear localization sequences are known in the art and would be apparent to the skilled artisan. For example, NLS sequences are described in Plank et al., international PCT application, PCT/EP2000/011690, filed Nov. 23, 2000, published as WO/2001/038547 on May 31, 2001, the contents of which are incorporated herein by reference for its disclosure of exemplary nuclear localization sequences. In some embodiments, a NLS comprises the amino acid sequence PKKKRKV (SEQ ID NO: 9) or MDSLLMNRRKFLYQFKNVRWAKGRRETYLC (SEQ ID NO: 10).

### Linker

[0064] The term “linker,” as used herein, refers to a molecule linking two other molecules or moieties. The linker can be an amino acid sequence in the case of a linker joining two fusion proteins. For example, a Cas9 can be fused to an engineered ribozyme by an amino acid linker sequence. The linker can also be a nucleotide sequence in the case of joining two nucleotide sequences together. For example, in the instant case, the traditional guide RNA is linked via a spacer or linker nucleotide sequence to the RNA extension of an extended guide RNA which may comprise a RT template sequence and an RT primer binding site. In other embodiments, the linker is an organic molecule, group, polymer, or chemical moiety. In some embodiments, the linker is 5-100 amino acids in length, for example, 5, 6, 7, 8, 9, 10, 11, 12, 13, 14, 15, 16, 17, 18, 19, 20, 21, 22, 23, 24, 25, 26, 27, 28, 29, 30, 30-35, 35-40, 40-45, 45-50, 50-60, 60-70, 70-80, 80-90, 90-100, 100-150, or 150-200 amino acids in length. Longer or shorter linkers are also contemplated.

### Nucleic Acid Molecule

[0065] The term “nucleic acid,” as used herein, refers to a polymer of nucleotides. The polymer may include natural nucleosides (i.e., adenosine, thymidine, guanosine, cytidine, uridine, deoxyadenosine, deoxythymidine, deoxyguanosine, and deoxycytidine), nucleoside analogs (e.g., 2-aminoadenosine, 2-thiothymidine, inosine, pyrrolo-pyrimidine, 3-methyl adenosine, 5-methylcytidine, C5 bromouridine, C5 fluorouridine, C5 iodouridine, C5 propynyl uridine, C5 propynyl cytidine, C5 methylcytidine, 7 deazaadenosine, 7 deazaguanosine, 8 oxoadenosine, 8 oxoguanosine, 0(6) methylguanine, 4-acetylcytidine, 5-(carboxyhydroxymethyl)uridine, dihydrouridine, methylpseudouridine, 1-methyl adenosine, 1-methyl guanosine, N6-methyl adenosine, and 2-thiocytidine), chemically modified bases, biologically modified bases (e.g., methylated bases), intercalated bases, modified sugars (e.g., 2′-fluororibose, ribose, 2′-deoxyribose, 2′-O-methylcytidine, arabinose, and hexose), or modified phosphate groups (e.g., phosphorothioates and 5′ N phosphoramidite linkages).

### Promoter

[0066] The term “promoter” is art-recognized and refers to a nucleic acid molecule with a sequence recognized by the cellular transcription machinery and able to initiate transcription of a downstream gene. A promoter can be constitutively active, meaning that the promoter is always active in a given cellular context, or conditionally active, meaning that the promoter is only active in the presence of a specific condition. For example, a conditional promoter may only be active in the presence of a specific protein that connects a protein associated with a regulatory element in the promoter to the basic transcriptional machinery, or only in the absence of an inhibitory molecule. A subclass of conditionally active promoters are inducible promoters that require the presence of a small molecule “inducer” for activity. Examples of inducible promoters include, but are not limited to, arabinose-inducible promoters, Tet-on promoters, and tamoxifen-inducible promoters. A variety of constitutive, conditional, and inducible promoters are well known to the skilled artisan, and the skilled artisan will be able to ascertain a variety of such promoters useful in carrying out the instant invention, which is not limited in this respect.

### Protospacer Adjacent Motif (PAM)

[0067] The genome editing system described herein may utilize any Cas9, Cas9 variant or equivalent thereof. Such proteins bind to DNA sites at associated PAM sites, or “protospacer adjacent sequences.” As used herein, the term “protospacer adjacent sequence” or “PAM” refers to an approximately 2-6 base pair DNA sequence that is an important targeting component of a Cas9 nuclease. Typically, the PAM sequence is on either strand, and is downstream in the 5′ to 3′ direction of Cas9 cut site. The canonical PAM sequence (i.e., the PAM sequence that is associated with the Cas9 nuclease of Streptococcus pyogenes or SpCas9) is 5′-NGG-3′ wherein “N” is any nucleobase followed by two guanine (“G”) nucleobases. Different PAM sequences can be associated with different Cas9 nucleases or equivalent proteins from different organisms. In addition, any given Cas9 nuclease, e.g., SpCas9, may be modified to alter the PAM specificity of the nuclease such that the nuclease recognizes alternative PAM sequence.

[0068] For example, with reference to the canonical SpCas9 amino acid sequence is SEQ ID NO: 11, the PAM sequence can be modified by introducing one or more mutations, including (a) D1135V, R1335Q, and T1337R “the VQR variant”, which alters the PAM specificity to NGAN or NGNG, (b) D1135E, R1335Q, and T1337R “the EQR variant”, which alters the PAM specificity to NGAG, and (c) D1135V, G1218R, R1335E, and T1337R “the VRER variant”, which alters the PAM specificity to NGCG. In addition, the D1135E variant of canonical SpCas9 still recognizes NGG, but it is more selective compared to the wild type SpCas9 protein.

[0069] It will also be appreciated that Cas9 enzymes from different bacterial species (i.e., Cas9 orthologs) can have varying PAM specificities. For example, Cas9 from Staphylococcus aureus (SaCas9) recognizes NGRRT or NGRRN. In addition, Cas9 from Neisseria meningitis (NmCas) recognizes NNNNGATT. In another example, Cas9 from Streptococcus thermophilis (StCas9) recognizes NNAGAAW. In still another example, Cas9 from Treponema denticola (TdCas) recognizes NAAAAC. These examples are not meant to be limiting. It will be further appreciated that non-SpCas9s bind a variety of PAM sequences, which makes them useful when no suitable SpCas9 PAM sequence is present at the desired target cut site. Furthermore, non-SpCas9s may have other characteristics that make them more useful than SpCas9. For example, Cas9 from Staphylococcus aureus (SaCas9) is about 1 kilobase smaller than SpCas9, so it can be packaged into adeno-associated virus (AAV). Further reference may be made to Shah et al., “Protospacer recognition motifs: mixed identities and functional diversity,” RNA Biology, 10(5): 891-899 (which is incorporated herein by reference).

### Ribozyme

[0070] The term “ribozyme” or “ribonucleic acid enzyme” describes a class of RNA molecules which have the ability to catalyze specific biochemical reactions, including, but not limited to, RNA processing reactions (e.g., insertion, deletion, substitution, inversion of nucleotides in RNA), RNA splicing, viral replication, and transfer RNA biosynthesis. Naturally occurring ribozymes include, but are not limited to, RNase P, ribosomal RNA (rRNA), hammerhead ribozyme, hairpin ribozyme, twister ribozyme, twister sister ribozyme, hatchet ribozyme, pistol ribozyme, GIR1 branching ribozyme, glmS ribozyme, and splicing ribozymes (e.g., Group I self-splicing intron and Group II self-splicing intron). The genome editing systems (e.g., complexes comprising napDNAbp, guide RNA, and a ribozyme), pharmaceutical compositions, kits, and methods of editing may utilize naturally occurring ribozymes (modified to act on DNA), variants thereof, or artificial or engineered ribozymes, such as those described herein. Exemplary ribozymes are discussed herein.

### RNA-Protein Recruitment System

[0071] The genome editing system described herein may utilize RNA-protein recruitment systems to co-localize components of the editing system at a target DNA site (e.g., for achieving co-localization of napDNAbp/guide RNA complex with a ribozyme at a target DNA site). An exemplary system is the MS2 tagging technique, described herein.

### PACE

[0072] In various embodiment, the polypeptide components of the genome editing system, e.g., the napDNAbp, can be further change through evolutionary processes. The term “phage-assisted continuous evolution (PACE),” as used herein, refers to continuous evolution that employs phage as viral vectors. The general concept of PACE technology has been described, for example, in International PCT Application, PCT/US2009/056194, filed Sep. 8, 2009, published as WO 2010/028347 on Mar. 11, 2010; International PCT Application, PCT/US2011/066747, filed Dec. 22, 2011, published as WO 2012/088381 on Jun. 28, 2012; U.S. Application, U.S. Pat. No. 9,023,594, issued May 5, 2015, International PCT Application, PCT/US2015/012022, filed Jan. 20, 2015, published as WO 2015/134121 on Sep. 11, 2015, and International PCT Application, PCT/US2016/027795, filed Apr. 15, 2016, published as WO 2016/168631 on Oct. 20, 2016, the entire contents of each of which are incorporated herein by reference.

### Protein, Peptide, and Polypeptide

[0073] The terms “protein,” “peptide,” and “polypeptide” are used interchangeably herein, and refer to a polymer of amino acid residues linked together by peptide (amide) bonds. The terms refer to a protein, peptide, or polypeptide of any size, structure, or function. Typically, a protein, peptide, or polypeptide will be at least three amino acids long. A protein, peptide, or polypeptide may refer to an individual protein or a collection of proteins. One or more of the amino acids in a protein, peptide, or polypeptide may be modified, for example, by the addition of a chemical entity such as a carbohydrate group, a hydroxyl group, a phosphate group, a farnesyl group, an isofarnesyl group, a fatty acid group, a linker for conjugation, functionalization, or other modification, etc. A protein, peptide, or polypeptide may also be a single molecule or may be a multi-molecular complex. A protein, peptide, or polypeptide may be just a fragment of a naturally occurring protein or peptide. A protein, peptide, or polypeptide may be naturally occurring, recombinant, or synthetic, or any combination thereof. Any of the proteins provided herein may be produced by any method known in the art. For example, the proteins provided herein may be produced via recombinant protein expression and purification, which is especially suited for fusion proteins comprising a peptide linker. Methods for recombinant protein expression and purification are well known, and include those described by Green and Sambrook, Molecular Cloning: A Laboratory Manual (4th ed., Cold Spring Harbor Laboratory Press, Cold Spring Harbor, N.Y. (2012)), the entire contents of which are incorporated herein by reference.

### Protein Splicing

[0074] The term “protein splicing,” as used herein, refers to a process in which a sequence, an intein (or split inteins, as the case may be), is excised from within an amino acid sequence, and the remaining fragments of the amino acid sequence, the exteins, are ligated via an amide bond to form a continuous amino acid sequence. The term “trans” protein splicing refers to the specific case where the inteins are split inteins and they are located on different proteins.

### Spacer Sequence

[0075] As used herein, the term “spacer sequence” in connection with a guide RNA refers to the portion of the guide RNA of about 20 nucleotides which contains a nucleotide sequence that matches the protospacer sequence in the target DNA sequence, and which anneals to the strand of the target DNA site that is complementary to the protospacer.

### Split Intein

[0076] Although inteins are most frequently found as a contiguous domain, some exist in a naturally split form. In this case, the two fragments are expressed as separate polypeptides and must associate before splicing takes place, so-called protein trans-splicing. In the context of the instant disclosure, split inteins may be utilized as a strategy to rejoin split portions of a complete protein, which of which are separately expressed and/or delivered to a cell. This can be utilized in the context of delivering smaller fragments of a genome editing system described herein wherein the polypeptide component(s) (e.g., the napDNAbp) is split into two half portions (of the same or different size, depending on the split site) which are separately delivered to the same cell (e.g., by vector transfection and expressed in cell, or by nucleoprotein complexes for direct transfer of the half proteins into the same cell) and then which are reformed as a complete polypeptide through the process of trans-splicing.

[0077] An exemplary split intein is the Ssp DnaE intein, which comprises two subunits, namely, DnaE-N and DnaE-C. The two different subunits are encoded by separate genes, namely dnaE-n and dnaE-c, which encode the DnaE-N and DnaE-C subunits, respectively. DnaE is a naturally occurring split intein in Synechocytis sp. PCC6803 and is capable of directing trans-splicing of two separate proteins, each comprising a fusion with either DnaE-N or DnaE-C.

[0078] Additional naturally occurring or engineered split-intein sequences are known in the or can be made from whole-intein sequences described herein or those available in the art. Examples of split-intein sequences can be found in Stevens et al., “A promiscuous split intein with expanded protein engineering applications,” PNAS, 2017, Vol. 114: 8538-8543; Iwai et al., “Highly efficient protein trans-splicing by a naturally split DnaE intein from Nostc punctiforme, FEBS Lett, 580: 1853-1858, each of which are incorporated herein by reference. Additional split intein sequences can be found, for example, in WO 2013/045632, WO 2014/055782, WO 2016/069774, and EP2877490, the contents each of which are incorporated herein by reference.

[0079] In addition, protein splicing in trans has been described in vivo and in vitro (Shingledecker, et al., Gene 207:187 (1998), Southworth, et al., EMBO J. 17:918 (1998); Mills, et al., Proc. Natl. Acad. Sci. USA, 95:3543-3548 (1998); Lew, et al., J. Biol. Chem., 273:15887-15890 (1998); Wu, et al., Biochim. Biophys. Acta 35732:1 (1998b), Yamazaki, et al., J. Am. Chem. Soc. 120:5591 (1998), Evans, et al., J. Biol. Chem. 275:9091 (2000); Otomo, et al., Biochemistry 38:16040-16044 (1999); Otomo, et al., J. Biolmol. NMR 14:105-114 (1999); Scott, et al., Proc. Natl. Acad. Sci. USA 96:13638-13643 (1999)) and provides the opportunity to express a protein as to two inactive fragments that subsequently undergo ligation to form a functional product.

### Subject

[0080] The term “subject,” as used herein, refers to an individual organism, for example, an individual mammal. In some embodiments, the subject is a human. In some embodiments, the subject is a non-human mammal. In some embodiments, the subject is a non-human primate. In some embodiments, the subject is a rodent. In some embodiments, the subject is a sheep, a goat, a cattle, a cat, or a dog. In some embodiments, the subject is a vertebrate, an amphibian, a reptile, a fish, an insect, a fly, or a nematode. In some embodiments, the subject is a research animal. In some embodiments, the subject is genetically engineered, e.g., a genetically engineered non-human subject. The subject may be of either sex and at any stage of development.

### Target Site

[0081] The term “target site” refers to a sequence within a nucleic acid molecule that is edited by an editor composition disclosed herein. For example, a target site can refer to the nucleotide position at which the engineered ribozymes described herein may install an insertion or deletion.

### Targeting Moiety

[0082] The term “targeting moiety” refers to a structural element which binds to a targeting moiety receptor. For example, a ribozyme of the present disclosure may include one or more targeting moieties to facilitate the localization of the ribozyme to a target site bound by a napDNAbp (e.g., Cas9), wherein the napDNAbp comprises a targeting moiety receptor which interacts with and binds the targeting moiety. For example, a targeting moiety can include an MS2 hairpin structure integrated into the ribozyme. The MS2 hairpin structure binds to a bacteriophage coat protein, which can be fused or otherwise attached to the napDNAbp (e.g., Cas9).

### Targeting Moiety Receptor

[0083] The term “targeting moiety receptor” refers to the structural feature that binds to a targeting moiety. In certain embodiments, the targeting moiety receptor can be fused or otherwise attached to the napDNAbp such that the ribozyme becomes localized to the napDNAbp once bound to a target site. For example, a targeting moiety can include an MS2 hairpin structure integrated into the ribozyme. The MS2 hairpin structure binds to a bacteriophage coat protein, which can be fused or otherwise attached to the napDNAbp (e.g., Cas9).

### Transitions

[0084] As used herein, “transitions” refer to the interchange of purine nucleobases (A↔G) or the interchange of pyrimidine nucleobases (C↔T). This class of interchanges involves nucleobases of similar shape. The compositions and methods disclosed herein are capable of inducing one or more transitions in a target DNA molecule. The compositions and methods disclosed herein are also capable of inducing both transitions and transversion in the same target DNA molecule. These changes involve A↔G, G↔A, C↔T, or T↔C. In the context of a double-strand DNA with Watson-Crick paired nucleobases, transversions refer to the following base pair exchanges: A:T↔G:C, G:G↔A:T, C:G↔T:A, or T:A↔C:G. The compositions and methods disclosed herein are capable of inducing one or more transitions in a target DNA molecule. The compositions and methods disclosed herein are also capable of inducing both transitions and transversion in the same target DNA molecule, as well as other nucleotide changes, including deletions and insertions.

### Transversions

[0085] As used herein, “transversions” refer to the interchange of purine nucleobases for pyrimidine nucleobases, or in the reverse and thus, involve the interchange of nucleobases with dissimilar shape. These changes involve T↔A, T↔G, C↔G, C↔A, A↔T, A↔C, G↔C, and G↔T. In the context of a double-strand DNA with Watson-Crick paired nucleobases, transversions refer to the following base pair exchanges: T:A↔A:T, T:A↔G:C, C:G↔G:C, C:G↔A:T, A:T↔T:A, A:T↔C:G, G:C↔C:G, and G:C↔T:A. The compositions and methods disclosed herein are capable of inducing one or more transversions in a target DNA molecule. The compositions and methods disclosed herein are also capable of inducing both transitions and transversion in the same target DNA molecule, as well as other nucleotide changes, including deletions and insertions.

### Treatment

[0086] The terms “treatment,” “treat,” and “treating,” refer to a clinical intervention aimed to reverse, alleviate, delay the onset of, or inhibit the progress of a disease or disorder, or one or more symptoms thereof, as described herein. As used herein, the terms “treatment,” “treat,” and “treating” refer to a clinical intervention aimed to reverse, alleviate, delay the onset of, or inhibit the progress of a disease or disorder, or one or more symptoms thereof, as described herein. In some embodiments, treatment may be administered after one or more symptoms have developed and/or after a disease has been diagnosed. In other embodiments, treatment may be administered in the absence of symptoms, e.g., to prevent or delay onset of a symptom or inhibit onset or progression of a disease. For example, treatment may be administered to a susceptible individual prior to the onset of symptoms (e.g., in light of a history of symptoms and/or in light of genetic or other susceptibility factors). Treatment may also be continued after symptoms have resolved, for example, to prevent or delay their recurrence.

### Ribozyme-Mediated Programmable Editing System

[0087] As used herein, the term “ribozyme-mediated programmable editing system” or “ribozyme-mediated programmable editor” refers to a novel approach (and the compositions achieving said novel approach) for gene editing that is mediated by both an engineered ribozyme and one or more napDNAbps to carry out the direct installment of insertions or deletions at a desired genome target site. In general, the napDNAbp component is programmed with a guide RNA to bind the napDNAbp to a target site for editing. The napDNAbp (e.g., Cas9) then forms an R-loop structure comprising the nucleotide site to be modified (e.g., the point of insertion or deletion by the ribozyme), and the engineered ribozyme then binds to the single-strand DNA region and installs the desired insertion or deletion. Following DNA repair and/or replication processes that occur naturally in the cell, the insertion or deletion becomes permanently installed at the target site. In embodiments, this insertion or deletion of a single nucleotide can correct a frameshift mutation.

### Variant

[0088] As used herein the term “variant” should be taken to mean the exhibition of qualities that have a pattern that deviates from what occurs in nature, e.g., a variant Cas9 is a Cas9 comprising one or more changes in amino acid residues as compared to a wild type Cas9 amino acid sequence. The term “variant” encompasses homologous proteins having at least 75%, or at least 80%, or at least 85%, or at least 90%, or at least 95%, or at least 99% percent identity with a reference sequence and having the same or substantially the same functional activity or activities as the reference sequence. The term also encompasses mutants, trunctations, or domains of a reference sequence, and which display the same or substantially the same functional activity or activities as the reference sequence.

### Vector

[0089] The term “vector,” as used herein, refers to a nucleic acid that can be modified to encode a gene of interest and that is able to enter into a host cell, mutate and replicate within the host cell, and then transfer a replicated form of the vector into another host cell. Exemplary suitable vectors include viral vectors, such as retroviral vectors or bacteriophages and filamentous phage, and conjugative plasmids. Additional suitable vectors will be apparent to those of skill in the art based on the instant disclosure.

### Wild Type

[0090] As used herein the term “wild type” is a term of the art understood by skilled persons and means the typical form of an organism, strain, gene or characteristic as it occurs in nature as distinguished from mutant or variant forms.

### DETAILED DESCRIPTION OF CERTAIN EMBODIMENTS

[0091] Small genomic insertions or deletions are known to cause a wide variety of genetic diseases. Current methods to repair these mu-tations are inefficient, generally restricted to mitotic cells, and prone to result in the stochastic insertion or deletion of random nucleotides (indels). No published method directly enables the insertion or deletion of a given nucleotide at a specified genetic locus. The development of such a technology would advance genome editing therapeutics by enabling the direct correction of frameshift mutations.

[0092] Base editing is a form of genome editing that enables the directed, targeted installation of certain classes of point mutations with greatly improved efficiency and reduced indel formation relative to other methods. This approach has been made possible by tethering base-modifying enzymes to RNA-guided endonucleases such as Cas9, targeting them to specific genetic loci.

[0093] The present specification relates to a genome editing system that is distinct from base editing in that it relies on the activity of ribozymes. The genome editing system provided herein is capable of directly installing an insertion or deletion of a given nucleotide at a specified genetic locus using a ribozyme in combination with a complex comprising a napDNAbp and a guide RNA.

[0094] The compositions and methods involve the novel combination of the use an engineered RNA enzyme (i.e., “ribozyme”) that is capable of site-specifically inserting or deleting a single nucleotide at a genetic locus and the use of a nucleic acid programmable DNA binding protein (napDNAbp) (e.g., Cas9) to target the engineered ribozyme to a specified genetic locus, thereby allowing for the direct installation of an insertion of deletion at the specified genetic locus by the engineered ribozyme.

[0095] In one embodiment of the present disclosure, as shown in the Figures and described in the Brief Description of the Figures, an RNA enzyme, or ribozyme, was engineered to site-specifically insert a single nucleotide at a genetic locus targeted by Cas9. A previously evolved version of the group I self-splicing intron was modified to site-specifically insert and subsequently ligate into place a single guanosine nucleotide into single-stranded DNA. Subsequently, the ability of this ribozyme to act on double-stranded DNA that was bound by a Cas9:guide RNA complex in vitro was demonstrated before its ability to function in human cells was examined. It was found that localizing the ribozyme to the same genetic locus as Cas9 enabled it to modify its genomic target.

[1] napDNAbp

[0096] The genome editing system described herein comprises a nucleic acid programmable DNA binding protein (napDNAbp), which becomes targeted to a DNA edit site by complexing with a guide RNA. In certain embodiments, the napDNAbp may modified to recruit a ribozyme to the DNA edit site. For example, an RNA-protein recruitment system may be used (e.g., an MS2 tagging system) wherein the napDNAbp is expressed as a fusion with an MCP, and the ribozyme is cotranscribed with an MS2 hairpin structure, such that the ribozyme binds to the napDNAbp through the recruiting action of the MCP/MS2 hairpin interaction. In other embodiments, the napDNAbp can be further modified with additional functional domains, such as an NLS.

[0097] In one embodiment, the ribozyme can be the engineered ribozyme of FIG. 1A. FIG. 1A shows the sequence and secondary structure of (a) an exemplary engineered ribozyme based on the ribozyme of Tetrahymena group I intron with mutations identified in directed evolution that enable the ribozyme to bind and cleave ssDNA (blue and/or indicated with a “star”) and insertions and deletions that enable nucleotide (e.g., GTP) insertion (red boxes). For example, element (b) refers to the deletion of the terminal nucleotides (e.g., the terminal 4 nucleotides) of the ribozyme, which inactivates the self-insertion activity of the ribozyme for self-insertion into the DNA target or substrate with which the ribozyme is interacting. This is also shown in more details in FIG. 3B. Element (c) shows engineered changes in the active site which interacts with the substrate DNA, catalyzing the insertion of the nucleotide at the target site of the target DNA substrate. Element (d) refers to the location or site of insertion of an MS2 hairpin (AUCUU sequence is removed and replaced with the MS2 hairpin), which functions as a targeting moiety to localize the engineered ribozyme to a bound napDNAbp/guide RNA complex to a target DNA site, wherein the napDNAbp is modified to incorporate a cognate targeting moiety receptor. The nucleotide sequence of the ribozyme of FIG. 1A, as shown, is SEQ ID NO: 88.

[0098] A great variety of napDNAbp are known in the art at the time of this filing and all are contemplated for use in the genome editing system described herein. The napDNAbps can be associated with or complexed with at least one guide nucleic acid (e.g., guide RNA), which localizes the napDNAbp to a DNA sequence that comprises a DNA strand (i.e., a target strand) that is complementary to the guide nucleic acid, or a portion thereof (e.g., the spacer of a guide RNA which anneals to a complementary strand of the DNA target). In other words, the guide nucleic-acid “programs” the napDNAbp (e.g., Cas9 or equivalent) to localize and bind to the target DNA edit site.

[0099] Any suitable napDNAbp may be used in the genome editing system described herein. In various embodiments, the napDNAbp may be any Class 2 CRISPR-Cas system, including any type II, type V, or type VI CRISPR-Cas enzyme. Given the rapid development of CRISPR-Cas as a tool for genome editing, there have been constant developments in the nomenclature used to describe and/or identify CRISPR-Cas enzymes, such as Cas9 and Cas9 orthologs. This application references CRISPR-Cas enzymes with nomenclature that may be old and/or new. The skilled person will be able to identify the specific CRISPR-Cas enzyme being referenced in this Application based on the nomenclature that is used, whether it is old (i.e., “legacy”) or new nomenclature. CRISPR-Cas nomenclature is extensively discussed in Makarova et al., “Classification and Nomenclature of CRISPR-Cas Systems: Where from Here?,” The CRISPR Journal, Vol. 1. No. 5, 2018, the entire contents of which are incorporated herein by reference. The particular CRISPR-Cas nomenclature used in any given instance in this Application is not limiting in any way and the skilled person will be able to identify which CRISPR-Cas enzyme is being referenced.

[0100] For example, the following type II, type V, and type VI Class 2 CRISPR-Cas enzymes have the following art-recognized old (i.e., legacy) and new names. Each of these enzymes, and/or variants thereof, may be used with the genome editing system described herein:

| | |
|---|---|
| Legacy nomenclature | Current nomenclature* |

type II CRISPR-Cas enzymes

| | |
|---|---|
| Cas9 | same |

type V CRISPR-Cas enzymes

| | |
|---|---|
| Cpf1 | Cas12a |
| CasX | Cas12e |
| C2c1 | Cas12b1 |
| Cas12b2 | same |
| C2c3 | Cas12c |
| CasY | Cas12d |
| C2c4 | same |
| C2c8 | same |
| C2c5 | same |
| C2c10 | same |
| C2c9 | same |

type VI CRISPR-Cas enzymes

| | |
|---|---|
| C2c2 | Cas13a |
| Cas13d | same |
| C2c7 | Cas13c |
| C2c6 | Cas13b |

*See Makarova et al., The CRISPR Journal, Vol. 1, No. 5, 2018

[0101] Without being bound by theory, the mechanism of action of certain napDNAbp contemplated herein includes the step of forming an R-loop whereby the napDNAbp induces the unwinding of a double-strand DNA target, thereby separating the strands in the region bound by the napDNAbp. The guide RNA spacer then hybridizes to the “target strand”, which is the complement of the protospacer sequence. This displaces a “non-target strand” that is complementary to the target strand, which forms the single strand region of the R-loop. In some embodiments, the napDNAbp includes one or more nuclease activities, which then cut the DNA leaving various types of lesions. For example, the napDNAbp may comprises a nuclease activity that cuts the non-target strand at a first location, and/or cuts the target strand at a second location. Depending on the nuclease activity, the target DNA can be cut to form a “double-stranded break” whereby both strands are cut. In other embodiments, the target DNA can be cut at only a single site, i.e., the DNA is “nicked” on one strand. Exemplary napDNAbp with different nuclease activities include “Cas9 nickase” (“nCas9”) and a deactivated Cas9 having no nuclease activities (“dead Cas9” or “dCas9”).

[0102] The below description of various napDNAbps which can be used in connection with the presently disclose genome editing system is not meant to be limiting in any way. The genome editing system may comprise the canonical SpCas9, or any ortholog Cas9 protein, or any variant Cas9 protein—including any naturally occurring variant, mutant, or otherwise engineered version of Cas9—that is known or which can be made or evolved through a directed evolutionary or otherwise mutagenic process. In various embodiments, the Cas9 or Cas9 variants have a nickase activity, i.e., only cleave of strand of the target DNA sequence. In other embodiments, the Cas9 or Cas9 variants have inactive nucleases, i.e., are “dead” Cas9 proteins. Other variant Cas9 proteins that may be used are those having a smaller molecular weight than the canonical SpCas9 (e.g., for easier delivery) or having modified or rearranged primary amino acid structure (e.g., the circular permutant formats).

[0103] The genome editing system described herein may also comprise Cas9 equivalents, including Cas12a (Cpf1) and Cas12b1 proteins which are the result of convergent evolution. The napDNAbps used herein (e.g., SpCas9, Cas9 variant, or Cas9 equivalents) may also may also contain various modifications that alter/enhance their PAM specifities. Lastly, the application contemplates any Cas9, Cas9 variant, or Cas9 equivalent which has at least 70%, at least 75%, at least 80%, at least 85%, at least 90%, at least 91%, at least 92%, at least 93%, at least 94%, at least 95%, at least 96%, at least 97%, at least 98%, at least 99%, or at least 99.9% sequence identity to a reference Cas9 sequence, such as a references SpCas9 canonical sequence or a reference Cas9 equivalent (e.g., Cas12a (Cpf1)).

[0104] The napDNAbp can be a CRISPR (clustered regularly interspaced short palindromic repeat)-associated nuclease. As outlined above, CRISPR is an adaptive immune system that provides protection against mobile genetic elements (viruses, transposable elements and conjugative plasmids). CRISPR clusters contain spacers, sequences complementary to antecedent mobile elements, and target invading nucleic acids. CRISPR clusters are transcribed and processed into CRISPR RNA (crRNA). In type II CRISPR systems correct processing of pre-crRNA requires a trans-encoded small RNA (tracrRNA), endogenous ribonuclease 3 (mc) and a Cas9 protein. The tracrRNA serves as a guide for ribonuclease 3-aided processing of pre-crRNA. Subsequently, Cas9/crRNA/tracrRNA endonucleolytically cleaves linear or circular dsDNA target complementary to the spacer. The target strand not complementary to crRNA is first cut endonucleolytically, then trimmed 3′-5′ exonucleolytically. In nature, DNA-binding and cleavage typically requires protein and both RNAs. However, single guide RNAs (“sgRNA”, or simply “gRNA”) can be engineered so as to incorporate aspects of both the crRNA and tracrRNA into a single RNA species. See, e.g., Jinek M. et al., Science 337:816-821(2012), the entire contents of which is hereby incorporated by reference.

[0105] In some embodiments, the napDNAbp directs cleavage of one or both strands at the location of a target sequence, such as within the target sequence and/or within the complement of the target sequence. In some embodiments, the napDNAbp directs cleavage of one or both strands within about 1, 2, 3, 4, 5, 6, 7, 8, 9, 10, 15, 20, 25, 50, 100, 200, 500, or more base pairs from the first or last nucleotide of a target sequence. In some embodiments, a vector encodes a napDNAbp that is mutated to with respect to a corresponding wild-type enzyme such that the mutated napDNAbp lacks the ability to cleave one or both strands of a target polynucleotide containing a target sequence. For example, an aspartate-to-alanine substitution (D10A) in the RuvC I catalytic domain of Cas9 from S. pyogenes converts Cas9 from a nuclease that cleaves both strands to a nickase (cleaves a single strand). Other examples of mutations that render Cas9 a nickase include, without limitation, H840A, N854A, and N863A in reference to the canonical SpCas9 sequence, or to equivalent amino acid positions in other Cas9 variants or Cas9 equivalents.

[0106] As used herein, the term “Cas protein” refers to a full-length Cas protein obtained from nature, a recombinant Cas protein having a sequences that differs from a naturally occurring Cas protein, or any fragment of a Cas protein that nevertheless retains all or a significant amount of the requisite basic functions needed for the disclosed methods, i.e., (i) possession of nucleic-acid programmable binding of the Cas protein to a target DNA, and (ii) ability to nick the target DNA sequence on one strand. The Cas proteins contemplated herein embrace CRISPR Cas9 proteins, as well as Cas9 equivalents, variants (e.g., Cas9 nickase (nCas9) or nuclease inactive Cas9 (dCas9)) homologs, orthologs, or paralogs, whether naturally occurring or non-naturally occurring (e.g., engineered or recombinant), and may include a Cas9 equivalent from anyClass 2 CRISPR system (e.g., type II, V, VI), including Cas12a (Cpf1), Cas12e (CasX), Cas12b1 (C2c1), Cas12b2, Cas12c (C2c3), C2c4, C2c8, C2c5, C2c10, C2c9 Cas13a (C2c2), Cas13d, Cas13c (C2c7), Cas13b (C2c6), and Cas13b. Further Cas-equivalents are described in Makarova et al., “C2c2 is a single-component programmable RNA-guided RNA-targeting CRISPR effector,” Science 2016; 353(6299) and Makarova et al., “Classification and Nomenclature of CRISPR-Cas Systems: Where from Here?,” The CRISPR Journal, Vol. 1. No. 5, 2018, the contents of which are incorporated herein by reference.

[0107] The terms “Cas9” or “Cas9 nuclease” or “Cas9 moiety” or “Cas9 domain” embrace any naturally occurring Cas9 from any organism, any naturally-occurring Cas9 equivalent or functional fragment thereof, any Cas9 homolog, ortholog, or paralog from any organism, and any mutant or variant of a Cas9, naturally-occurring or engineered. The term Cas9 is not meant to be particularly limiting and may be referred to as a “Cas9 or equivalent.” Exemplary Cas9 proteins are further described herein and/or are described in the art and are incorporated herein by reference. The present disclosure is unlimited with regard to the particular Cas9 that is employed in the genome editing system described herein.

[0108] As noted herein, Cas9 nuclease sequences and structures are well known to those of skill in the art (see, e.g., “Complete genome sequence of an M1 strain of Streptococcus pyogenes.” Ferretti et al., J. J., McShan W. M., Ajdic D. J., Savic D. J., Savic G., Lyon K., Primeaux C., Sezate S., Suvorov A. N., Kenton S., Lai H. S., Lin S. P., Qian Y., Jia H. G., Najar F. Z., Ren Q., Zhu H., Song L., White J., Yuan X., Clifton S. W., Roe B. A., McLaughlin R. E., Proc. Natl. Acad. Sci. U.S.A. 98:4658-4663(2001); “CRISPR RNA maturation by trans-encoded small RNA and host factor RNase III.” Deltcheva E., Chylinski K., Sharma C. M., Gonzales K., Chao Y., Pirzada Z. A., Eckert M. R., Vogel J., Charpentier E., Nature 471:602-607(2011); and “A programmable dual-RNA-guided DNA endonuclease in adaptive bacterial immunity.” Jinek M., Chylinski K., Fonfara I., Hauer M., Doudna J. A., Charpentier E. Science 337:816-821(2012), the entire contents of each of which are incorporated herein by reference).

[0109] Examples of Cas9 and Cas9 equivalents are provided as follows; however, these specific examples are not meant to be limiting. The genome editing system of the present disclosure may use any suitable napDNAbp, including any suitable Cas9 or Cas9 equivalent. The following are exemplary napDNAbp that may be used.

### A. Wild Type Canonical SpCas9

[0110] In one embodiment, the genome editing system described herein may comprise the “canonical SpCas9” nuclease from S. pyogenes, which has been widely used as a tool for genome engineering and is categorized as the type II subgroup of enzymes of the Class 2 CRISPR-Cas systems. This Cas9 protein is a large, multi-domain protein containing two distinct nuclease domains. Point mutations can be introduced into Cas9 to abolish one or both nuclease activities, resulting in a nickase Cas9 (nCas9) or dead Cas9 (dCas9), respectively, that still retains its ability to bind DNA in a sgRNA-programmed manner. In principle, when fused to another protein or domain, Cas9 or variant thereof (e.g., nCas9) can target that protein to virtually any DNA sequence simply by co-expression with an appropriate sgRNA. As used herein, the canonical SpCas9 protein refers to the wild type protein from Streptococcus pyogenes having the following amino acid sequence:

| Description | Sequence | SEQ ID NO: |
|---|---|---|
| SpCas9 | MDKKYSIGLDIGTNSVGWAVITDEYKVPSKKFKVLGNTDRHSI | SEQ ID NO: |
| Streptococcus | KKNLIGALLFDSGETAEATRLKRTARRRYTRR | 11 |
| pyogenes | KNRICYLQEIFSNEMAKVDDSFFHRLEESFLVEEDKKH | |
| M1 | ERHPIFGNIVDEVAYHEKYPTIYHLRKKLVDSTDKADL | |
| SwissProt | RLIYLALAHMIKFRGHFLIEGDLNPDNSDVDKLFIQLVQ | |
| Accession | TYNQLFEENPINASGVDAKAILSARLSKSRRLENLIAQL | |
| No. | PGEKKNGLFGNLIALSLGLTPNFKSNFDLAEDAKLQLS | |
| Q99ZW2 | KDTYDDDLDNLLAQIGDQYADLFLAAKNLSDAILLSDI | |
| Wild type | LRVNTEITKAPLSASMIKRYDEHHQDLTLLKALVRQQL | |
| | PEKYKEIFFDQSKNGYAGYIDGGASQEEFYKFIKPILEK | |
| | MDGTEELLVKLNREDLLRKQRTFDNGSIPHQIHLGELH | |
| | AILRRQEDFYPFLKDNREKIEKILTFRIPYYVGPLARGN | |
| | SRFAWMTRKSEETITPWNFEEVVDKGASAQSFIERMTN | |
| | FDKNLPNEKVLPKHSLLYEYFTVYNELTKVKYVTEGM | |
| | RKPAFLSGEQKKAIVDLLFKTNRKVTVKQLKEDYFKKI | |
| | ECFDSVEISGVEDRFNASLGTYHDLLKIIKDKDFLDNEE | |
| | NEDILEDIVLTLTLFEDREMIEERLKTYAHLFDDKVMK | |
| | QLKRRRYTGWGRLSRKLINGIRDKQSGKTILDFLKSDG | |
| | FANRNFMQLIHDDSLTFKEDIQKAQVSGQGDSLHEHIA | |
| | NLAGSPAIKKGILQTVKVVDELVKVMGRHKPENIVIEM | |
| | ARENQTTQKGQKNSRERMKRIEEGIKELGSQILKEHPV | |
| | ENTQLQNEKLYLYYLQNGRDMYVDQELDINRLSDYD | |
| | VDHIVPQSFLKDDSIDNKVLTRSDKNRGKSDNVPSEEV | |
| | VKKMKNYWRQLLNAKLITQRKFDNLTKAERGGLSEL | |
| | DKAGFIKRQLVETRQITKHVAQILDSRMNTKYDENDK | |
| | LIREVKVITLKSKLVSDFRKDFQFYKVREINNYHHAHD | |
| | AYLNAVVGTALIKKYPKLESEFVYGDYKVYDVRKMIA | |
| | KSEQEIGKATAKYFFYSNIMNFFKTEITLANGEIRKRPLI | |
| | ETNGETGEIVWDKGRDFATVRKVLSMPQVNIVKKTEV | |
| | QTGGFSKESILPKRNSDKLIARKKDWDPKKYGGFDSPT | |
| | VAYSVLVVAKVEKGKSKKLKSVKELLGITIMERSSFEK | |
| | NPIDFLEAKGYKEVKKDLIIKLPKYSLFELENGRKRML | |
| | ASAGELQKGNELALPSKYVNFLYLASHYEKLKGSPED | |
| | NEQKQLFVEQHKHYLDEIIEQISEFSKRVILADANLDKV | |
| | LSAYNKHRDKPIREQAENIIHLFTLTNLGAPAAFKYFDT | |
| | TIDRKRYTSTKEVLDATLIHQSITGLYETRIDLSQLGGD | |
| SpCas9 | ATGGATAAAAAATATAGCATTGGCCTGGATATTGGC | SEQ ID NO: |
| Reverse | ACCAACAGCGTGGGCTGGGCGGTGATTACCGATGAA | 12 |
| translation | TATAAAGTGCCGAGCAAAAAATTTAAAGTGCTGGGC | |
| of | AACACCGATCGCCATAGCATTAAAAAAAACCTGATT | |
| SwissProt | GGCGCGCTGCTGTTTGATAGCGGCGAAACCGCGGAA | |
| Accession | GCGACCCGCCTGAAACGCACCGCGCGCCGCCGCTAT | |
| No. | ACCCGCCGCAAAAACCGCATTTGCTATCTGCAGGAA | |
| Q99ZW2 | ATTTTTAGCAACGAAATGGCGAAAGTGGATGATAGC | |
| Streptococcus | TTTTTTCATCGCCTGGAAGAAAGCTTTCTGGTGGAAG | |
| pyogenes | AAGATAAAAAACATGAACGCCATCCGATTTTTGGCA | |
| | ACATTGTGGATGAAGTGGCGTATCATGAAAAATATC | |
| | CGACCATTTATCATCTGCGCAAAAAACTGGTGGATA | |
| | GCACCGATAAAGCGGATCTGCGCCTGATTTATCTGG | |
| | CGCTGGCGCATATGATTAAATTTCGCGGCCATTTTCT | |
| | GATTGAAGGCGATCTGAACCCGGATAACAGCGATGT | |
| | GGATAAACTGTTTATTCAGCTGGTGCAGACCTATAA | |
| | CCAGCTGTTTGAAGAAAACCCGATTAACGCGAGCGG | |
| | CGTGGATGCGAAAGCGATTCTGAGCGCGCGCCTGAG | |
| | CAAAAGCCGCCGCCTGGAAAACCTGATTGCGCAGCT | |
| | GCCGGGCGAAAAAAAAAACGGCCTGTTTGGCAACCT | |
| | GATTGCGCTGAGCCTGGGCCTGACCCCGAACTTTAA | |
| | AAGCAACTTTGATCTGGCGGAAGATGCGAAACTGCA | |
| | GCTGAGCAAAGATACCTATGATGATGATCTGGATAA | |
| | CCTGCTGGCGCAGATTGGCGATCAGTATGCGGATCT | |
| | GTTTCTGGCGGCGAAAAACCTGAGCGATGCGATTCT | |
| | GCTGAGCGATATTCTGCGCGTGAACACCGAAATTAC | |
| | CAAAGCGCCGCTGAGCGCGAGCATGATTAAACGCTA | |
| | TGATGAACATCATCAGGATCTGACCCTGCTGAAAGC | |
| | GCTGGTGCGCCAGCAGCTGCCGGAAAAATATAAAG | |
| | AAATTTTTTTTGATCAGAGCAAAAACGGCTATGCGG | |
| | GCTATATTGATGGCGGCGCGAGCCAGGAAGAATTTT | |
| | ATAAATTTATTAAACCGATTCTGGAAAAAATGGATG | |
| | GCACCGAAGAACTGCTGGTGAAACTGAACCGCGAA | |
| | GATCTGCTGCGCAAACAGCGCACCTTTGATAACGGC | |
| | AGCATTCCGCATCAGATTCATCTGGGCGAACTGCAT | |
| | GCGATTCTGCGCCGCCAGGAAGATTTTTATCCGTTTC | |
| | TGAAAGATAACCGCGAAAAAATTGAAAAAATTCTG | |
| | ACCTTTCGCATTCCGTATTATGTGGGCCCGCTGGCGC | |
| | GCGGCAACAGCCGCTTTGCGTGGATGACCCGCAAAA | |
| | GCGAAGAAACCATTACCCCGTGGAACTTTGAAGAAG | |
| | TGGTGGATAAAGGCGCGAGCGCGCAGAGCTTTATTG | |
| | AACGCATGACCAACTTTGATAAAAACCTGCCGAACG | |
| | AAAAAGTGCTGCCGAAACATAGCCTGCTGTATGAAT | |
| | ATTTTACCGTGTATAACGAACTGACCAAAGTGAAAT | |
| | ATGTGACCGAAGGCATGCGCAAACCGGCGTTTCTGA | |
| | GCGGCGAACAGAAAAAAGCGATTGTGGATCTGCTGT | |
| | TTAAAACCAACCGCAAAGTGACCGTGAAACAGCTGA | |
| | AAGAAGATTATTTTAAAAAAATTGAATGCTTTGATA | |
| | GCGTGGAAATTAGCGGCGTGGAAGATCGCTTTAACG | |
| | CGAGCCTGGGCACCTATCATGATCTGCTGAAAATTA | |
| | TTAAAGATAAAGATTTTCTGGATAACGAAGAAAACG | |
| | AAGATATTCTGGAAGATATTGTGCTGACCCTGACCC | |
| | TGTTTGAAGATCGCGAAATGATTGAAGAACGCCTGA | |
| | AAACCTATGCGCATCTGTTTGATGATAAAGTGATGA | |
| | AACAGCTGAAACGCCGCCGCTATACCGGCTGGGGCC | |
| | GCCTGAGCCGCAAACTGATTAACGGCATTCGCGATA | |
| | AACAGAGCGGCAAAACCATTCTGGATTTTCTGAAAA | |
| | GCGATGGCTTTGCGAACCGCAACTTTATGCAGCTGA | |
| | TTCATGATGATAGCCTGACCTTTAAAGAAGATATTC | |
| | AGAAAGCGCAGGTGAGCGGCCAGGGCGATAGCCTG | |
| | CATGAACATATTGCGAACCTGGCGGGCAGCCCGGCG | |
| | ATTAAAAAAGGCATTCTGCAGACCGTGAAAGTGGTG | |
| | GATGAACTGGTGAAAGTGATGGGCCGCCATAAACCG | |
| | GAAAACATTGTGATTGAAATGGCGCGCGAAAACCA | |
| | GACCACCCAGAAAGGCCAGAAAAACAGCCGCGAAC | |
| | GCATGAAACGCATTGAAGAAGGCATTAAAGAACTG | |
| | GGCAGCCAGATTCTGAAAGAACATCCGGTGGAAAA | |
| | CACCCAGCTGCAGAACGAAAAACTGTATCTGTATTA | |
| | TCTGCAGAACGGCCGCGATATGTATGTGGATCAGGA | |
| | ACTGGATATTAACCGCCTGAGCGATTATGATGTGGA | |
| | TCATATTGTGCCGCAGAGCTTTCTGAAAGATGATAG | |
| | CATTGATAACAAAGTGCTGACCCGCAGCGATAAAAA | |
| | CCGCGGCAAAAGCGATAACGTGCCGAGCGAAGAAG | |
| | TGGTGAAAAAAATGAAAAACTATTGGCGCCAGCTGC | |
| | TGAACGCGAAACTGATTACCCAGCGCAAATTTGATA | |
| | ACCTGACCAAAGCGGAACGCGGCGGCCTGAGCGAA | |
| | CTGGATAAAGCGGGCTTTATTAAACGCCAGCTGGTG | |
| | GAAACCCGCCAGATTACCAAACATGTGGCGCAGATT | |
| | CTGGATAGCCGCATGAACACCAAATATGATGAAAAC | |
| | GATAAACTGATTCGCGAAGTGAAAGTGATTACCCTG | |
| | AAAAGCAAACTGGTGAGCGATTTTCGCAAAGATTTT | |
| | CAGTTTTATAAAGTGCGCGAAATTAACAACTATCAT | |
| | CATGCGCATGATGCGTATCTGAACGCGGTGGTGGGC | |
| | ACCGCGCTGATTAAAAAATATCCGAAACTGGAAAGC | |
| | GAATTTGTGTATGGCGATTATAAAGTGTATGATGTG | |
| | CGCAAAATGATTGCGAAAAGCGAACAGGAAATTGG | |
| | CAAAGCGACCGCGAAATATTTTTTTTATAGCAACAT | |
| | TATGAACTTTTTTAAAACCGAAATTACCCTGGCGAA | |
| | CGGCGAAATTCGCAAACGCCCGCTGATTGAAACCAA | |
| | CGGCGAAACCGGCGAAATTGTGTGGGATAAAGGCC | |
| | GCGATTTTGCGACCGTGCGCAAAGTGCTGAGCATGC | |
| | CGCAGGTGAACATTGTGAAAAAAACCGAAGTGCAG | |
| | ACCGGCGGCTTTAGCAAAGAAAGCATTCTGCCGAAA | |
| | CGCAACAGCGATAAACTGATTGCGCGCAAAAAAGA | |
| | TTGGGATCCGAAAAAATATGGCGGCTTTGATAGCCC | |
| | GACCGTGGCGTATAGCGTGCTGGTGGTGGCGAAAGT | |
| | GGAAAAAGGCAAAAGCAAAAAACTGAAAAGCGTGA | |
| | AAGAACTGCTGGGCATTACCATTATGGAACGCAGCA | |
| | GCTTTGAAAAAAACCCGATTGATTTTCTGGAAGCGA | |
| | AAGGCTATAAAGAAGTGAAAAAAGATCTGATTATTA | |
| | AACTGCCGAAATATAGCCTGTTTGAACTGGAAAACG | |
| | GCCGCAAACGCATGCTGGCGAGCGCGGGCGAACTG | |
| | CAGAAAGGCAACGAACTGGCGCTGCCGAGCAAATA | |
| | TGTGAACTTTCTGTATCTGGCGAGCCATTATGAAAA | |
| | ACTGAAAGGCAGCCCGGAAGATAACGAACAGAAAC | |
| | AGCTGTTTGTGGAACAGCATAAACATTATCTGGATG | |
| | AAATTATTGAACAGATTAGCGAATTTAGCAAACGCG | |
| | TGATTCTGGCGGATGCGAACCTGGATAAAGTGCTGA | |
| | GCGCGTATAACAAACATCGCGATAAACCGATTCGCG | |
| | AACAGGCGGAAAACATTATTCATCTGTTTACCCTGA | |
| | CCAACCTGGGCGCGCCGGCGGCGTTTAAATATTTTG | |
| | ATACCACCATTGATCGCAAACGCTATACCAGCACCA | |
| | AAGAAGTGCTGGATGCGACCCTGATTCATCAGAGCA | |
| | TTACCGGCCTGTATGAAACCCGCATTGATCTGAGCC | |
| | AGCTGGGCGGCGAT | |

[0111] The genome editing system described herein may include canonical SpCas9 or any variant thereof having at least 80%, at least 85%, at least 90%, at least 95%, or at least 99% sequence identity with a wild type Cas9 sequence provided above. These variants may include SpCas9 variants containing one or more mutations, including any known mutation reported with the SwissProt Accession No. Q99ZW2 (SEQ ID NO: 11 entry, which include:

| SpCas9 mutation (relative to the | Function/Characteristic (as reported) (see |
|---|---|
| amino acid sequence of the canonical | UniProtKB - Q99ZW2 (CAS9_STRPT1) entry - |
| SpCas9 sequence, SEQ ID NO: 11) | incorporated herein by reference) |
| D10A | Nickase mutant which cleaves the protospacer |
| | strand (but no cleavage of non-protospacer strand) |
| S15A | Decreased DNA cleavage activity |
| R66A | Decreased DNA cleavage activity |
| R70A | No DNA cleavage |
| R74A | Decreased DNA cleavage |
| R78A | Decreased DNA cleavage |
| 97-150 deletion | No nuclease activity |
| R165A | Decreased DNA cleavage |
| 175-307 deletion | About 50% decreased DNA cleavage |
| 312-409 deletion | No nuclease activity |
| E762A | Nickase |
| H840A | Nickase mutant which cleaves the non-protospacer |
| | strand but does not cleave the protospacer strand |
| N854A | Nickase |
| N863A | Nickase |
| H982A | Decreased DNA cleavage |
| D986A | Nickase |
| 1099-1368 deletion | No nuclease activity |
| R1333A | Reduced DNA binding |

1. Other wild type SpCas9 sequences that may be used in the present disclosure, include:

| Description | Sequence | SEQ ID NO: |
|---|---|---|
| SpCas9 | ATGGATAAGAAATACTCAATAGGCTTAGATATCGGCACAAAT | SEQ ID NO: |
| Streptococcus | AGCGTCGGATGGGCGGTGATCACTGATGATTA | 13 |
| pyogenes | TAAGGTTCCGTCTAAAAAGTTCAAGGTTCTGGGAAAT | |
| MGAS1882 | ACAGACCGCCACAGTATCAAAAAAAATCTTATAGGGG | |
| wild type | CTCTTTTATTTGGCAGTGGAGAGACAGCGGAAGCGAC | |
| NC_017053.1 | TCGTCTCAAACGGACAGCTCGTAGAAGGTATACACGT | |
| | CGGAAGAATCGTATTTGTTATCTACAGGAGATTTTTTC | |
| | AAATGAGATGGCGAAAGTAGATGATAGTTTCTTTCATC | |
| | GACTTGAAGAGTCTTTTTTGGTGGAAGAAGACAAGAA | |
| | GCATGAACGTCATCCTATTTTTGGAAATATAGTAGATG | |
| | AAGTTGCTTATCATGAGAAATATCCAACTATCTATCAT | |
| | CTGCGAAAAAAATTGGCAGATTCTACTGATAAAGCGG | |
| | ATTTGCGCTTAATCTATTTGGCCTTAGCGCATATGATT | |
| | AAGTTTCGTGGTCATTTTTTGATTGAGGGAGATTTAAA | |
| | TCCTGATAATAGTGATGTGGACAAACTATTTATCCAGT | |
| | TGGTACAAATCTACAATCAATTATTTGAAGAAAACCCT | |
| | ATTAACGCAAGTAGAGTAGATGCTAAAGCGATTCTTTC | |
| | TGCACGATTGAGTAAATCAAGACGATTAGAAAATCTC | |
| | ATTGCTCAGCTCCCCGGTGAGAAGAGAAATGGCTTGTT | |
| | TGGGAATCTCATTGCTTTGTCATTGGGATTGACCCCTA | |
| | ATTTTAAATCAAATTTTGATTTGGCAGAAGATGCTAAA | |
| | TTACAGCTTTCAAAAGATACTTACGATGATGATTTAGA | |
| | TAATTTATTGGCGCAAATTGGAGATCAATATGCTGATT | |
| | TGTTTTTGGCAGCTAAGAATTTATCAGATGCTATTTTA | |
| | CTTTCAGATATCCTAAGAGTAAATAGTGAAATAACTA | |
| | AGGCTCCCCTATCAGCTTCAATGATTAAGCGCTACGAT | |
| | GAACATCATCAAGACTTGACTCTTTTAAAAGCTTTAGT | |
| | TCGACAACAACTTCCAGAAAAGTATAAAGAAATCTTT | |
| | TTTGATCAATCAAAAAACGGATATGCAGGTTATATTGA | |
| | TGGGGGAGCTAGCCAAGAAGAATTTTATAAATTTATC | |
| | AAACCAATTTTAGAAAAAATGGATGGTACTGAGGAAT | |
| | TATTGGTGAAACTAAATCGTGAAGATTTGCTGCGCAA | |
| | GCAACGGACCTTTGACAACGGCTCTATTCCCCATCAAA | |
| | TTCACTTGGGTGAGCTGCATGCTATTTTGAGAAGACAA | |
| | GAAGACTTTTATCCATTTTTAAAAGACAATCGTGAGAA | |
| | GATTGAAAAAATCTTGACTTTTCGAATTCCTTATTATG | |
| | TTGGTCCATTGGCGCGTGGCAATAGTCGTTTTGCATGG | |
| | ATGACTCGGAAGTCTGAAGAAACAATTACCCCATGGA | |
| | ATTTTGAAGAAGTTGTCGATAAAGGTGCTTCAGCTCAA | |
| | TCATTTATTGAACGCATGACAAACTTTGATAAAAATCT | |
| | TCCAAATGAAAAAGTACTACCAAAACATAGTTTGCTTT | |
| | ATGAGTATTTTACGGTTTATAACGAATTGACAAAGGTC | |
| | AAATATGTTACTGAGGGAATGCGAAAACCAGCATTTC | |
| | TTTCAGGTGAACAGAAGAAAGCCATTGTTGATTTACTC | |
| | TTCAAAACAAATCGAAAAGTAACCGTTAAGCAATTAA | |
| | AAGAAGATTATTTCAAAAAAATAGAATGTTTTGATAG | |
| | TGTTGAAATTTCAGGAGTTGAAGATAGATTTAATGCTT | |
| | CATTAGGCGCCTACCATGATTTGCTAAAAATTATTAAA | |
| | GATAAAGATTTTTTGGATAATGAAGAAAATGAAGATA | |
| | TCTTAGAGGATATTGTTTTAACATTGACCTTATTTGAA | |
| | GATAGGGGGATGATTGAGGAAAGACTTAAAACATATG | |
| | CTCACCTCTTTGATGATAAGGTGATGAAACAGCTTAAA | |
| | CGTCGCCGTTATACTGGTTGGGGACGTTTGTCTCGAAA | |
| | ATTGATTAATGGTATTAGGGATAAGCAATCTGGCAAA | |
| | ACAATATTAGATTTTTTGAAATCAGATGGTTTTGCCAA | |
| | TCGCAATTTTATGCAGCTGATCCATGATGATAGTTTGA | |
| | CATTTAAAGAAGATATTCAAAAAGCACAGGTGTCTGG | |
| | ACAAGGCCATAGTTTACATGAACAGATTGCTAACTTA | |
| | GCTGGCAGTCCTGCTATTAAAAAAGGTATTTTACAGAC | |
| | TGTAAAAATTGTTGATGAACTGGTCAAAGTAATGGGG | |
| | CATAAGCCAGAAAATATCGTTATTGAAATGGCACGTG | |
| | AAAATCAGACAACTCAAAAGGGCCAGAAAAATTCGCG | |
| | AGAGCGTATGAAACGAATCGAAGAAGGTATCAAAGA | |
| | ATTAGGAAGTCAGATTCTTAAAGAGCATCCTGTTGAA | |
| | AATACTCAATTGCAAAATGAAAAGCTCTATCTCTATTA | |
| | TCTACAAAATGGAAGAGACATGTATGTGGACCAAGAA | |
| | TTAGATATTAATCGTTTAAGTGATTATGATGTCGATCA | |
| | CATTGTTCCACAAAGTTTCATTAAAGACGATTCAATAG | |
| | ACAATAAGGTACTAACGCGTTCTGATAAAAATCGTGG | |
| | TAAATCGGATAACGTTCCAAGTGAAGAAGTAGTCAAA | |
| | AAGATGAAAAACTATTGGAGACAACTTCTAAACGCCA | |
| | AGTTAATCACTCAACGTAAGTTTGATAATTTAACGAAA | |
| | GCTGAACGTGGAGGTTTGAGTGAACTTGATAAAGCTG | |
| | GTTTTATCAAACGCCAATTGGTTGAAACTCGCCAAATC | |
| | ACTAAGCATGTGGCACAAATTTTGGATAGTCGCATGA | |
| | ATACTAAATACGATGAAAATGATAAACTTATTCGAGA | |
| | GGTTAAAGTGATTACCTTAAAATCTAAATTAGTTTCTG | |
| | ACTTCCGAAAAGATTTCCAATTCTATAAAGTACGTGAG | |
| | ATTAACAATTACCATCATGCCCATGATGCGTATCTAAA | |
| | TGCCGTCGTTGGAACTGCTTTGATTAAGAAATATCCAA | |
| | AACTTGAATCGGAGTTTGTCTATGGTGATTATAAAGTT | |
| | TATGATGTTCGTAAAATGATTGCTAAGTCTGAGCAAGA | |
| | AATAGGCAAAGCAACCGCAAAATATTTCTTTTACTCTA | |
| | ATATCATGAACTTCTTCAAAACAGAAATTACACTTGCA | |
| | AATGGAGAGATTCGCAAACGCCCTCTAATCGAAACTA | |
| | ATGGGGAAACTGGAGAAATTGTCTGGGATAAAGGGCG | |
| | AGATTTTGCCACAGTGCGCAAAGTATTGTCCATGCCCC | |
| | AAGTCAATATTGTCAAGAAAACAGAAGTACAGACAGG | |
| | CGGATTCTCCAAGGAGTCAATTTTACCAAAAAGAAAT | |
| | TCGGACAAGCTTATTGCTCGTAAAAAAGACTGGGATC | |
| | CAAAAAAATATGGTGGTTTTGATAGTCCAACGGTAGC | |
| | TTATTCAGTCCTAGTGGTTGCTAAGGTGGAAAAAGGG | |
| | AAATCGAAGAAGTTAAAATCCGTTAAAGAGTTACTAG | |
| | GGATCACAATTATGGAAAGAAGTTCCTTTGAAAAAAA | |
| | TCCGATTGACTTTTTAGAAGCTAAAGGATATAAGGAA | |
| | GTTAAAAAAGACTTAATCATTAAACTACCTAAATATA | |
| | GTCTTTTTGAGTTAGAAAACGGTCGTAAACGGATGCTG | |
| | GCTAGTGCCGGAGAATTACAAAAAGGAAATGAGCTGG | |
| | CTCTGCCAAGCAAATATGTGAATTTTTTATATTTAGCT | |
| | AGTCATTATGAAAAGTTGAAGGGTAGTCCAGAAGATA | |
| | ACGAACAAAAACAATTGTTTGTGGAGCAGCATAAGCA | |
| | TTATTTAGATGAGATTATTGAGCAAATCAGTGAATTTT | |
| | CTAAGCGTGTTATTTTAGCAGATGCCAATTTAGATAAA | |
| | GTTCTTAGTGCATATAACAAACATAGAGACAAACCAA | |
| | TACGTGAACAAGCAGAAAATATTATTCATTTATTTACG | |
| | TTGACGAATCTTGGAGCTCCCGCTGCTTTTAAATATTT | |
| | TGATACAACAATTGATCGTAAACGATATACGTCTACA | |
| | AAAGAAGTTTTAGATGCCACTCTTATCCATCAATCCAT | |
| | CACTGGTCTTTATGAAACACGCATTGATTTGAGTCAGC | |
| | TAGGAGGTGACTGA | |
| SpCas9 | MDKKYSIGLDIGTNSVGWAVITDDYKVPSKKFKVLGNT | SEQ ID NO: |
| Streptococcus | DRHSIKKNLIGALLFGSGETAEATRLKRTARRRYTRRKN | 14 |
| pyogenes | RICYLQEIFSNEMAKVDDSFFHRLEESFLVEEDKKHERHP | |
| MGAS1882 | IFGNIVDEVAYHEKYPTIYHLRKKLADSTDKADLRLIYLA | |
| wild type | LAHMIKFRGHFLIEGDLNPDNSDVDKLFIQLVQIYNQLFE | |
| NC_017053.1 | ENPINASRVDAKAILSARLSKSRRLENLIAQLPGEKRNGL | |
| | FGNLIALSLGLTPNFKSNFDLAEDAKLQLSKDTYDDDLD | |
| | NLLAQIGDQYADLFLAAKNLSDAILLSDILRVNSEITKAP | |
| | LSASMIKRYDEHHQDLTLLKALVRQQLPEKYKEIFFDQS | |
| | KNGYAGYIDGGASQEEFYKFIKPILEKMDGTEELLVKLN | |
| | REDLLRKQRTFDNGSIPHQIHLGELHAILRRQEDFYPFLK | |
| | DNREKIEKILTFRIPYYVGPLARGNSRFAWMTRKSEETITP | |
| | WNFEEVVDKGASAQSFIERMTNFDKNLPNEKVLPKHSLL | |
| | YEYFTVYNELTKVKYVTEGMRKPAFLSGEQKKAIVDLLF | |
| | KTNRKVTVKQLKEDYFKKIECFDSVEISGVEDRFNASLG | |
| | AYHDLLKIIKDKDFLDNEENEDILEDIVLTLTLFEDRGMIE | |
| | ERLKTYAHLFDDKVMKQLKRRRYTGWGRLSRKLINGIR | |
| | DKQSGKTILDFLKSDGFANRNFMQLIHDDSLTFKEDIQKA | |
| | QVSGQGHSLHEQIANLAGSPAIKKGILQTVKIVDELVKV | |
| | MGHKPENIVIEMARENQTTQKGQKNSRERMKRIEEGIKE | |
| | LGSQILKEHPVENTQLQNEKLYLYYLQNGRDMYVDQEL | |
| | DINRLSDYDVDHIVPQSFIKDDSIDNKVLTRSDKNRGKSD | |
| | NVPSEEVVKKMKNYWRQLLNAKLITQRKFDNLTKAERG | |
| | GLSELDKAGFIKRQLVETRQITKHVAQILDSRMNTKYDE | |
| | NDKLIREVKVITLKSKLVSDFRKDFQFYKVREINNYHHA | |
| | HDAYLNAVVGTALIKKYPKLESEFVYGDYKVYDVRKMI | |
| | AKSEQEIGKATAKYFFYSNIMNFFKTEITLANGEIRKRPLI | |
| | ETNGETGEIVWDKGRDFATVRKVLSMPQVNIVKKTEVQ | |
| | TGGFSKESILPKRNSDKLIARKKDWDPKKYGGFDSPTVA | |
| | YSVLVVAKVEKGKSKKLKSVKELLGITIMERSSFEKNPID | |
| | FLEAKGYKEVKKDLIIKLPKYSLFELENGRKRMLASAGE | |
| | LQKGNELALPSKYVNFLYLASHYEKLKGSPEDNEQKQLF | |
| | VEQHKHYLDEIIEQISEFSKRVILADANLDKVLSAYNKHR | |
| | DKPIREQAENIIHLFTLTNLGAPAAFKYFDTTIDRKRYTST | |
| | KEVLDATLIHQSITGLYETRIDLSQLGGD | |
| SpCas9 | ATGGATAAAAAGTATTCTATTGGTTTAGACATCGGCAC | SEQ ID NO: |
| Streptococcus | TAATTCCGTTGGATGGGCTGTCATAACCGATGAATACA | 15 |
| pyogenes | AAGTACCTTCAAAGAAATTTAAGGTGTTGGGGAACAC | |
| wild type | AGACCGTCATTCGATTAAAAAGAATCTTATCGGTGCCC | |
| SWBC2D7W | TCCTATTCGATAGTGGCGAAACGGCAGAGGCGACTCG | |
| 014 | CCTGAAACGAACCGCTCGGAGAAGGTATACACGTCGC | |
| | AAGAACCGAATATGTTACTTACAAGAAATTTTTAGCA | |
| | ATGAGATGGCCAAAGTTGACGATTCTTTCTTTCACCGT | |
| | TTGGAAGAGTCCTTCCTTGTCGAAGAGGACAAGAAAC | |
| | ATGAACGGCACCCCATCTTTGGAAACATAGTAGATGA | |
| | GGTGGCATATCATGAAAAGTACCCAACGATTTATCAC | |
| | CTCAGAAAAAAGCTAGTTGACTCAACTGATAAAGCGG | |
| | ACCTGAGGTTAATCTACTTGGCTCTTGCCCATATGATA | |
| | AAGTTCCGTGGGCACTTTCTCATTGAGGGTGATCTAAA | |
| | TCCGGACAACTCGGATGTCGACAAACTGTTCATCCAGT | |
| | TAGTACAAACCTATAATCAGTTGTTTGAAGAGAACCCT | |
| | ATAAATGCAAGTGGCGTGGATGCGAAGGCTATTCTTA | |
| | GCGCCCGCCTCTCTAAATCCCGACGGCTAGAAAACCT | |
| | GATCGCACAATTACCCGGAGAGAAGAAAAATGGGTTG | |
| | TTCGGTAACCTTATAGCGCTCTCACTAGGCCTGACACC | |
| | AAATTTTAAGTCGAACTTCGACTTAGCTGAAGATGCCA | |
| | AATTGCAGCTTAGTAAGGACACGTACGATGACGATCT | |
| | CGACAATCTACTGGCACAAATTGGAGATCAGTATGCG | |
| | GACTTATTTTTGGCTGCCAAAAACCTTAGCGATGCAAT | |
| | CCTCCTATCTGACATACTGAGAGTTAATACTGAGATTA | |
| | CCAAGGCGCCGTTATCCGCTTCAATGATCAAAAGGTA | |
| | CGATGAACATCACCAAGACTTGACACTTCTCAAGGCC | |
| | CTAGTCCGTCAGCAACTGCCTGAGAAATATAAGGAAA | |
| | TATTCTTTGATCAGTCGAAAAACGGGTACGCAGGTTAT | |
| | ATTGACGGCGGAGCGAGTCAAGAGGAATTCTACAAGT | |
| | TTATCAAACCCATATTAGAGAAGATGGATGGGACGGA | |
| | AGAGTTGCTTGTAAAACTCAATCGCGAAGATCTACTGC | |
| | GAAAGCAGCGGACTTTCGACAACGGTAGCATTCCACA | |
| | TCAAATCCACTTAGGCGAATTGCATGCTATACTTAGAA | |
| | GGCAGGAGGATTTTTATCCGTTCCTCAAAGACAATCGT | |
| | GAAAAGATTGAGAAAATCCTAACCTTTCGCATACCTTA | |
| | CTATGTGGGACCCCTGGCCCGAGGGAACTCTCGGTTCG | |
| | CATGGATGACAAGAAAGTCCGAAGAAACGATTACTCC | |
| | ATGGAATTTTGAGGAAGTTGTCGATAAAGGTGCGTCA | |
| | GCTCAATCGTTCATCGAGAGGATGACCAACTTTGACA | |
| | AGAATTTACCGAACGAAAAAGTATTGCCTAAGCACAG | |
| | TTTACTTTACGAGTATTTCACAGTGTACAATGAACTCA | |
| | CGAAAGTTAAGTATGTCACTGAGGGCATGCGTAAACC | |
| | CGCCTTTCTAAGCGGAGAACAGAAGAAAGCAATAGTA | |
| | GATCTGTTATTCAAGACCAACCGCAAAGTGACAGTTA | |
| | AGCAATTGAAAGAGGACTACTTTAAGAAAATTGAATG | |
| | CTTCGATTCTGTCGAGATCTCCGGGGTAGAAGATCGAT | |
| | TTAATGCGTCACTTGGTACGTATCATGACCTCCTAAAG | |
| | ATAATTAAAGATAAGGACTTCCTGGATAACGAAGAGA | |
| | ATGAAGATATCTTAGAAGATATAGTGTTGACTCTTACC | |
| | CTCTTTGAAGATCGGGAAATGATTGAGGAAAGACTAA | |
| | AAACATACGCTCACCTGTTCGACGATAAGGTTATGAA | |
| | ACAGTTAAAGAGGCGTCGCTATACGGGCTGGGGACGA | |
| | TTGTCGCGGAAACTTATCAACGGGATAAGAGACAAGC | |
| | AAAGTGGTAAAACTATTCTCGATTTTCTAAAGAGCGAC | |
| | GGCTTCGCCAATAGGAACTTTATGCAGCTGATCCATGA | |
| | TGACTCTTTAACCTTCAAAGAGGATATACAAAAGGCA | |
| | CAGGTTTCCGGACAAGGGGACTCATTGCACGAACATA | |
| | TTGCGAATCTTGCTGGTTCGCCAGCCATCAAAAAGGGC | |
| | ATACTCCAGACAGTCAAAGTAGTGGATGAGCTAGTTA | |
| | AGGTCATGGGACGTCACAAACCGGAAAACATTGTAAT | |
| | CGAGATGGCACGCGAAAATCAAACGACTCAGAAGGG | |
| | GCAAAAAAACAGTCGAGAGCGGATGAAGAGAATAGA | |
| | AGAGGGTATTAAAGAACTGGGCAGCCAGATCTTAAAG | |
| | GAGCATCCTGTGGAAAATACCCAATTGCAGAACGAGA | |
| | AACTTTACCTCTATTACCTACAAAATGGAAGGGACATG | |
| | TATGTTGATCAGGAACTGGACATAAACCGTTTATCTGA | |
| | TTACGACGTCGATCACATTGTACCCCAATCCTTTTTGA | |
| | AGGACGATTCAATCGACAATAAAGTGCTTACACGCTC | |
| | GGATAAGAACCGAGGGAAAAGTGACAATGTTCCAAGC | |
| | GAGGAAGTCGTAAAGAAAATGAAGAACTATTGGCGGC | |
| | AGCTCCTAAATGCGAAACTGATAACGCAAAGAAAGTT | |
| | CGATAACTTAACTAAAGCTGAGAGGGGTGGCTTGTCT | |
| | GAACTTGACAAGGCCGGATTTATTAAACGTCAGCTCGT | |
| | GGAAACCCGCCAAATCACAAAGCATGTTGCACAGATA | |
| | CTAGATTCCCGAATGAATACGAAATACGACGAGAACG | |
| | ATAAGCTGATTCGGGAAGTCAAAGTAATCACTTTAAA | |
| | GTCAAAATTGGTGTCGGACTTCAGAAAGGATTTTCAAT | |
| | TCTATAAAGTTAGGGAGATAAATAACTACCACCATGC | |
| | GCACGACGCTTATCTTAATGCCGTCGTAGGGACCGCAC | |
| | TCATTAAGAAATACCCGAAGCTAGAAAGTGAGTTTGT | |
| | GTATGGTGATTACAAAGTTTATGACGTCCGTAAGATGA | |
| | TCGCGAAAAGCGAACAGGAGATAGGCAAGGCTACAG | |
| | CCAAATACTTCTTTTATTCTAACATTATGAATTTCTTTA | |
| | AGACGGAAATCACTCTGGCAAACGGAGAGATACGCAA | |
| | ACGACCTTTAATTGAAACCAATGGGGAGACAGGTGAA | |
| | ATCGTATGGGATAAGGGCCGGGACTTCGCGACGGTGA | |
| | GAAAAGTTTTGTCCATGCCCCAAGTCAACATAGTAAA | |
| | GAAAACTGAGGTGCAGACCGGAGGGTTTTCAAAGGAA | |
| | TCGATTCTTCCAAAAAGGAATAGTGATAAGCTCATCGC | |
| | TCGTAAAAAGGACTGGGACCCGAAAAAGTACGGTGGC | |
| | TTCGATAGCCCTACAGTTGCCTATTCTGTCCTAGTAGT | |
| | GGCAAAAGTTGAGAAGGGAAAATCCAAGAAACTGAA | |
| | GTCAGTCAAAGAATTATTGGGGATAACGATTATGGAG | |
| | CGCTCGTCTTTTGAAAAGAACCCCATCGACTTCCTTGA | |
| | GGCGAAAGGTTACAAGGAAGTAAAAAAGGATCTCATA | |
| | ATTAAACTACCAAAGTATAGTCTGTTTGAGTTAGAAAA | |
| | TGGCCGAAAACGGATGTTGGCTAGCGCCGGAGAGCTT | |
| | CAAAAGGGGAACGAACTCGCACTACCGTCTAAATACG | |
| | TGAATTTCCTGTATTTAGCGTCCCATTACGAGAAGTTG | |
| | AAAGGTTCACCTGAAGATAACGAACAGAAGCAACTTT | |
| | TTGTTGAGCAGCACAAACATTATCTCGACGAAATCATA | |
| | GAGCAAATTTCGGAATTCAGTAAGAGAGTCATCCTAG | |
| | CTGATGCCAATCTGGACAAAGTATTAAGCGCATACAA | |
| | CAAGCACAGGGATAAACCCATACGTGAGCAGGCGGAA | |
| | AATATTATCCATTTGTTTACTCTTACCAACCTCGGCGCT | |
| | CCAGCCGCATTCAAGTATTTTGACACAACGATAGATCG | |
| | CAAACGATACACTTCTACCAAGGAGGTGCTAGACGCG | |
| | ACACTGATTCACCAATCCATCACGGGATTATATGAAAC | |
| | TCGGATAGATTTGTCACAGCTTGGGGGTGACGGATCCC | |
| | CCAAGAAGAAGAGGAAAGTCTCGAGCGACTACAAAG | |
| | ACCATGACGGTGATTATAAAGATCATGACATCGATTA | |
| | CAAGGATGACGATGACAAGGCTGCAGGA | |
| SpCas9 | MDKKYSIGLDIGTNSVGWAVITDEYKVPSKKFKVLGNTD | SEQ ID NO: |
| Streptococcus | RHSIKKNLIGALLFDSGETAEATRLKRTARRRYTRRKNRI | 16 |
| pyogenes | CYLQEIFSNEMAKVDDSFFHRLEESFLVEEDKKHERHPIF | |
| wild type | GNIVDEVAYHEKYPTIYHLRKKLVDSTDKADLRLIYLAL | |
| Encoded | AHMIKFRGHFLIEGDLNPDNSDVDKLFIQLVQTYNQLFEE | |
| product of | NPINTASGVDAKAILSARLSKSRRLENLIAQLPGEKKNGLF | |
| SWBC2D7W | GNLIALSLGLTPNFKSNFDLAEDAKLQLSKDTYDDDLDN | |
| 014 | LLAQIGDQYADLFLAAKNLSDAILLSDILRVNTEITKAPLS | |
| | ASMIKRYDEHHQDLTLLKALVRQQLPEKYKEIFFDQSKN | |
| | GYAGYIDGGASQEEFYKFIKPILEKMDGTEELLVKLNRE | |
| | DLLRKQRTFDNGSIPHQIHLGELHAILRRQEDFYPFLKDN | |
| | REKIEKILTFRIPYYVGPLARGNSRFAWMTRKSEETITPW | |
| | NFEEVVDKGASAQSFIERMTNFDKNLPNEKVLPKHSLLY | |
| | EYFTVYNELTKVKYVTEGMRKPAFLSGEQKKAIVDLLFK | |
| | TNRKVTVKQLKEDYFKKIECFDSVEISGVEDRFNASLGT | |
| | YHDLLKIIKDKDFLDNEENEDILEDIVLTLTLFEDREMIEE | |
| | RLKTYAHLFDDKVMKQLKRRRYTGWGRLSRKLINGIRD | |
| | KQSGKTILDFLKSDGFANRNFMQLIHDDSLTFKEDIQKAQ | |
| | VSGQGDSLHEHIANLAGSPAIKKGILQTVKVVDELVKVM | |
| | GRHKPENIVIEMARENQTTQKGQKNSRERMKRIEEGIKE | |
| | LGSQILKEHPVENTQLQNEKLYLYYLQNGRDMYVDQEL | |
| | DINRLSDYDVDHIVPQSFLKDDSIDNKVLTRSDKNRGKS | |
| | DNVPSEEVVKKMKNYWRQLLNAKLITQRKFDNLTKAER | |
| | GGLSELDKAGFIKRQLVETRQITKHVAQILDSRMNTKYD | |
| | ENDKLIREVKVITLKSKLVSDFRKDFQFYKVREINTNYHH | |
| | AHDAYLNAVVGTALIKKYPKLESEFVYGDYKVYDVRK | |
| | MIAKSEQEIGKATAKYFFYSNIMNFFKTEITLANGEIRKRP | |
| | LIETNGETGEIVWDKGRDFATVRKVLSMPQVNIVKKTEV | |
| | QTGGFSKESILPKRNSDKLIARKKDWDPKKYGGFDSPTV | |
| | AYSVLVVAKVEKGKSKKLKSVKELLGITIMERSSFEKNPI | |
| | DFLEAKGYKEVKKDLIIKLPKYSLFELENGRKRMLASAG | |
| | ELQKGNELALPSKYVNFLYLASHYEKLKGSPEDNEQKQL | |
| | FVEQHKHYLDEIIEQISEFSKRVILADANLDKVLSAYNKH | |
| | RDKPIREQAENIIHLFTLTNLGAPAAFKYFDTTIDRKRYTS | |
| | TKEVLDATLIHQSITGLYETRIDLSQLGGDGSPKKKRKVS | |
| | SDYKDHDGDYKDHDIDYKDDDDKAAG | |
| SpCas9 | ATGGATAAGAAATACTCAATAGGCTTAGATATCGGCA | SEQ ID NO: |
| Streptococcus | CAAATAGCGTCGGATGGGCGGTGATCACTGATGAATA | 17 |
| pyogenes | TAAGGTTCCGTCTAAAAAGTTCAAGGTTCTGGGAAAT | |
| M1GAS wild | ACAGACCGCCACAGTATCAAAAAAAATCTTATAGGGG | |
| type | CTCTTTTATTTGACAGTGGAGAGACAGCGGAAGCGAC | |
| NC_002737.2 | TCGTCTCAAACGGACAGCTCGTAGAAGGTATACACGT | |
| | CGGAAGAATCGTATTTGTTATCTACAGGAGATTTTTTC | |
| | AAATGAGATGGCGAAAGTAGATGATAGTTTCTTTCATC | |
| | GACTTGAAGAGTCTTTTTTGGTGGAAGAAGACAAGAA | |
| | GCATGAACGTCATCCTATTTTTGGAAATATAGTAGATG | |
| | AAGTTGCTTATCATGAGAAATATCCAACTATCTATCAT | |
| | CTGCGAAAAAAATTGGTAGATTCTACTGATAAAGCGG | |
| | ATTTGCGCTTAATCTATTTGGCCTTAGCGCATATGATT | |
| | AAGTTTCGTGGTCATTTTTTGATTGAGGGAGATTTAAA | |
| | TCCTGATAATAGTGATGTGGACAAACTATTTATCCAGT | |
| | TGGTACAAACCTACAATCAATTATTTGAAGAAAACCCT | |
| | ATTAACGCAAGTGGAGTAGATGCTAAAGCGATTCTTTC | |
| | TGCACGATTGAGTAAATCAAGACGATTAGAAAATCTC | |
| | ATTGCTCAGCTCCCCGGTGAGAAGAAAAATGGCTTATT | |
| | TGGGAATCTCATTGCTTTGTCATTGGGTTTGACCCCTA | |
| | ATTTTAAATCAAATTTTGATTTGGCAGAAGATGCTAAA | |
| | TTACAGCTTTCAAAAGATACTTACGATGATGATTTAGA | |
| | TAATTTATTGGCGCAAATTGGAGATCAATATGCTGATT | |
| | TGTTTTTGGCAGCTAAGAATTTATCAGATGCTATTTTA | |
| | CTTTCAGATATCCTAAGAGTAAATACTGAAATAACTAA | |
| | GGCTCCCCTATCAGCTTCAATGATTAAACGCTACGATG | |
| | AACATCATCAAGACTTGACTCTTTTAAAAGCTTTAGTT | |
| | CGACAACAACTTCCAGAAAAGTATAAAGAAATCTTTT | |
| | TTGATCAATCAAAAAACGGATATGCAGGTTATATTGAT | |
| | GGGGGAGCTAGCCAAGAAGAATTTTATAAATTTATCA | |
| | AACCAATTTTAGAAAAAATGGATGGTACTGAGGAATT | |
| | ATTGGTGAAACTAAATCGTGAAGATTTGCTGCGCAAG | |
| | CAACGGACCTTTGACAACGGCTCTATTCCCCATCAAAT | |
| | TCACTTGGGTGAGCTGCATGCTATTTTGAGAAGACAAG | |
| | AAGACTTTTATCCATTTTTAAAAGACAATCGTGAGAAG | |
| | ATTGAAAAAATCTTGACTTTTCGAATTCCTTATTATGTT | |
| | GGTCCATTGGCGCGTGGCAATAGTCGTTTTGCATGGAT | |
| | GACTCGGAAGTCTGAAGAAACAATTACCCCATGGAAT | |
| | TTTGAAGAAGTTGTCGATAAAGGTGCTTCAGCTCAATC | |
| | ATTTATTGAACGCATGACAAACTTTGATAAAAATCTTC | |
| | CAAATGAAAAAGTACTACCAAAACATAGTTTGCTTTAT | |
| | GAGTATTTTACGGTTTATAACGAATTGACAAAGGTCAA | |
| | ATATGTTACTGAAGGAATGCGAAAACCAGCATTTCTTT | |
| | CAGGTGAACAGAAGAAAGCCATTGTTGATTTACTCTTC | |
| | AAAACAAATCGAAAAGTAACCGTTAAGCAATTAAAAG | |
| | AAGATTATTTCAAAAAAATAGAATGTTTTGATAGTGTT | |
| | GAAATTTCAGGAGTTGAAGATAGATTTAATGCTTCATT | |
| | AGGTACCTACCATGATTTGCTAAAAATTATTAAAGATA | |
| | AAGATTTTTTGGATAATGAAGAAAATGAAGATATCTT | |
| | AGAGGATATTGTTTTAACATTGACCTTATTTGAAGATA | |
| | GGGAGATGATTGAGGAAAGACTTAAAACATATGCTCA | |
| | CCTCTTTGATGATAAGGTGATGAAACAGCTTAAACGTC | |
| | GCCGTTATACTGGTTGGGGACGTTTGTCTCGAAAATTG | |
| | ATTAATGGTATTAGGGATAAGCAATCTGGCAAAACAA | |
| | TATTAGATTTTTTGAAATCAGATGGTTTTGCCAATCGC | |
| | AATTTTATGCAGCTGATCCATGATGATAGTTTGACATT | |
| | TAAAGAAGACATTCAAAAAGCACAAGTGTCTGGACAA | |
| | GGCGATAGTTTACATGAACATATTGCAAATTTAGCTGG | |
| | TAGCCCTGCTATTAAAAAAGGTATTTTACAGACTGTAA | |
| | AAGTTGTTGATGAATTGGTCAAAGTAATGGGGCGGCA | |
| | TAAGCCAGAAAATATCGTTATTGAAATGGCACGTGAA | |
| | AATCAGACAACTCAAAAGGGCCAGAAAAATTCGCGAG | |
| | AGCGTATGAAACGAATCGAAGAAGGTATCAAAGAATT | |
| | AGGAAGTCAGATTCTTAAAGAGCATCCTGTTGAAAAT | |
| | ACTCAATTGCAAAATGAAAAGCTCTATCTCTATTATCT | |
| | CCAAAATGGAAGAGACATGTATGTGGACCAAGAATTA | |
| | GATATTAATCGTTTAAGTGATTATGATGTCGATCACAT | |
| | TGTTCCACAAAGTTTCCTTAAAGACGATTCAATAGACA | |
| | ATAAGGTCTTAACGCGTTCTGATAAAAATCGTGGTAA | |
| | ATCGGATAACGTTCCAAGTGAAGAAGTAGTCAAAAAG | |
| | ATGAAAAACTATTGGAGACAACTTCTAAACGCCAAGT | |
| | TAATCACTCAACGTAAGTTTGATAATTTAACGAAAGCT | |
| | GAACGTGGAGGTTTGAGTGAACTTGATAAAGCTGGTT | |
| | TTATCAAACGCCAATTGGTTGAAACTCGCCAAATCACT | |
| | AAGCATGTGGCACAAATTTTGGATAGTCGCATGAATA | |
| | CTAAATACGATGAAAATGATAAACTTATTCGAGAGGT | |
| | TAAAGTGATTACCTTAAAATCTAAATTAGTTTCTGACT | |
| | TCCGAAAAGATTTCCAATTCTATAAAGTACGTGAGATT | |
| | AACAATTACCATCATGCCCATGATGCGTATCTAAATGC | |
| | CGTCGTTGGAACTGCTTTGATTAAGAAATATCCAAAAC | |
| | TTGAATCGGAGTTTGTCTATGGTGATTATAAAGTTTAT | |
| | GATGTTCGTAAAATGATTGCTAAGTCTGAGCAAGAAA | |
| | TAGGCAAAGCAACCGCAAAATATTTCTTTTACTCTAAT | |
| | ATCATGAACTTCTTCAAAACAGAAATTACACTTGCAAA | |
| | TGGAGAGATTCGCAAACGCCCTCTAATCGAAACTAAT | |
| | GGGGAAACTGGAGAAATTGTCTGGGATAAAGGGCGAG | |
| | ATTTTGCCACAGTGCGCAAAGTATTGTCCATGCCCCAA | |
| | GTCAATATTGTCAAGAAAACAGAAGTACAGACAGGCG | |
| | GATTCTCCAAGGAGTCAATTTTACCAAAAAGAAATTC | |
| | GGACAAGCTTATTGCTCGTAAAAAAGACTGGGATCCA | |
| | AAAAAATATGGTGGTTTTGATAGTCCAACGGTAGCTTA | |
| | TTCAGTCCTAGTGGTTGCTAAGGTGGAAAAAGGGAAA | |
| | TCGAAGAAGTTAAAATCCGTTAAAGAGTTACTAGGGA | |
| | TCACAATTATGGAAAGAAGTTCCTTTGAAAAAAATCC | |
| | GATTGACTTTTTAGAAGCTAAAGGATATAAGGAAGTT | |
| | AAAAAAGACTTAATCATTAAACTACCTAAATATAGTCT | |
| | TTTTGAGTTAGAAAACGGTCGTAAACGGATGCTGGCT | |
| | AGTGCCGGAGAATTACAAAAAGGAAATGAGCTGGCTC | |
| | TGCCAAGCAAATATGTGAATTTTTTATATTTAGCTAGT | |
| | CATTATGAAAAGTTGAAGGGTAGTCCAGAAGATAACG | |
| | AACAAAAACAATTGTTTGTGGAGCAGCATAAGCATTA | |
| | TTTAGATGAGATTATTGAGCAAATCAGTGAATTTTCTA | |
| | AGCGTGTTATTTTAGCAGATGCCAATTTAGATAAAGTT | |
| | CTTAGTGCATATAACAAACATAGAGACAAACCAATAC | |
| | GTGAACAAGCAGAAAATATTATTCATTTATTTACGTTG | |
| | ACGAATCTTGGAGCTCCCGCTGCTTTTAAATATTTTGA | |
| | TACAACAATTGATCGTAAACGATATACGTCTACAAAA | |
| | GAAGTTTTAGATGCCACTCTTATCCATCAATCCATCAC | |
| | TGGTCTTTATGAAACACGCATTGATTTGAGTCAGCTAG | |
| | GAGGTGACTGA | |
| SpCas9 | MDKKYSIGLDIGTNSVGWAVITDEYKVPSKKFKVLGNTD | SEQ ID NO: |
| Streptococcus | RHSIKKNLIGALLFDSGETAEATRLKRTARRRYTRRKNRI | 18 |
| pyogenes | CYLQEIFSNEMAKVDDSFFHRLEESFLVEEDKKHERHPIF | |
| M1GAS wild | GNIVDEVAYHEKYPTIYHLRKKLVDSTDKADLRLIYLAL | |
| type | AHMIKFRGHFLIEGDLNPDNSDVDKLFIQLVQTYNQLFEE | |
| Encoded | NPINTASGVDAKAILSARLSKSRRLENLIAQLPGEKKNGLF | |
| product of | GNLIALSLGLTPNFKSNFDLAEDAKLQLSKDTYDDDLDN | |
| NC_002737.2 | LLAQIGDQYADLFLAAKNLSDAILLSDILRVNTEITKAPLS | |
| (100% | ASMIKRYDEHHQDLTLLKALVRQQLPEKYKEIFFDQSKN | |
| identical to | GYAGYIDGGASQEEFYKFIKPILEKMDGTEELLVKLNRE | |
| the canonical | DLLRKQRTFDNGSIPHQIHLGELHAILRRQEDFYPFLKDN | |
| Q99ZW2 | REKIEKILTFRIPYYVGPLARGNSRFAWMTRKSEETITPW | |
| wild type) | NFEEVVDKGASAQSFIERMTNFDKNLPNEKVLPKHSLLY | |
| | EYFTVYNELTKVKYVTEGMRKPAFLSGEQKKAIVDLLFK | |
| | TNRKVTVKQLKEDYFKKIECFDSVETSGVEDRFNASLGT | |
| | YHDLLKIIKDKDFLDNEENEDILEDIVLTLTLFEDREMIEE | |
| | RLKTYAHLFDDKVMKQLKRRRYTGWGRLSRKLINGIRD | |
| | KQSGKTILDFLKSDGFANRNFMQLIHDDSLTFKEDIQKAQ | |
| | VSGQGDSLHEHIANLAGSPAIKKGILQTVKVVDELVKVM | |
| | GRHKPENIVIEMARENQTTQKGQKNSRERMKRIEEGIKE | |
| | LGSQILKEHPVENTQLQNEKLYLYYLQNGRDMYVDQEL | |
| | DINRLSDYDVDHIVPQSFLKDDSIDNKVLTRSDKNRGKS | |
| | DNVPSEEVVKKMKNYWRQLLNAKLITQRKFDNLTKAER | |
| | GGLSELDKAGFIKRQLVETRQITKHVAQILDSRMNTKYD | |
| | ENDKLIREVKVITLKSKLVSDFRKDFQFYKVREINTNYHH | |
| | AHDAYLNAVVGTALIKKYPKLESEFVYGDYKVYDVRK | |
| | MIAKSEQEIGKATAKYFFYSNIMNFFKTEITLANGEIRKRP | |
| | LIETNGETGEIVWDKGRDFATVRKVLSMPQVNIVKKTEV | |
| | QTGGFSKESILPKRNSDKLIARKKDWDPKKYGGFDSPTV | |
| | AYSVLVVAKVEKGKSKKLKSVKELLGITIMERSSFEKNPI | |
| | DFLEAKGYKEVKKDLIIKLPKYSLFELENGRKRMLASAG | |
| | ELQKGNELALPSKYVNFLYLASHYEKLKGSPEDNEQKQL | |
| | FVEQHKHYLDEIIEQISEFSKRVILADANLDKVLSAYNKH | |
| | RDKPIREQAENIIHLFTLTNLGAPAAFKYFDTTIDRKRYTS | |
| | TKEVLDATLIHQSITGLYETRIDLSQLGGD | |

[0112] The genome editing system described herein may include any of the above SpCas9 sequences, or any variant thereof having at least 80%, at least 85%, at least 90%, at least 95%, or at least 99% sequence identity thereto.

### B. Wild Type Cas9 Orthologs

[0113] In other embodiments, the genome editing system described herein may utilize a wild type Cas9 ortholog from another bacterial species different from the canonical Cas9 from S. pyogenes. For example, the following Cas9 orthologs can be used in connection with the genome editing system described in this specification. In addition, any variant Cas9 orthologs having at least 80%, at least 85%, at least 90%, at least 95%, or at least 99% sequence identity to any of the below orthologs may also be used with the herein described editing system.

| Description | Sequence |
|---|---|
| LfCas9 | MKEYHIGLDIGTSSIGWAVTDSQFKLMRIKGKTAIGVRLFEEGKTAAERR |
| Lactobacillus | TFRTTRRRLKRRKWRLHYLDEIFAPHLQEVDENFLRRLKQSNIHPEDPTK |
| fermentum | NQAFIGKLLFPDLLKKNERGYPTLIKMRDELPVEQRAHYPVMNIYKLRE |
| wild type | AMINEDRQFDLREVYLAVHHIVKYRGHFLNNASVDKFKVGRIDFDKSFN |
| GenBank: | VLNEAYEELQNGEGSFTIEPSKVEKIGQLLLDTKMRKLDRQKAVAKLLE |
| SNX31424.11 | VKVADKEETKRNKQIATAMSKLVLGYKADFATVAMANGNEWKIDLSS |
| | ETSEDEIEKFREELSDAQNDILTEITSLFSQIMLNEIVPNGMSISESMMDRY |
| | WTHERQLAEVKEYLATQPASARKEFDQVYNKYIGQAPKERGFDLEKGL |
| | KKILSKKENWKEIDELLKAGDFLPKQRTSANGVIPHQMHQQELDRIIEKQ |
| | AKYYPWLATENPATGERDRHQAKYELDQLVSFRIPYYVGPLVTPEVQK |
| | ATSGAKFAWAKRKEDGEITPWNLWDKIDRAESAEAFIKRMTVKDTYLL |
| | NEDVLPANSLLYQKYNVLNELNNVRVNGRRLSVGIKQDIYTELFKKKKT |
| | VKASDVASLVMAKTRGVNKPSVEGLSDPKKFNSNLATYLDLKSIVGDK |
| | VDDNRYQTDLENIIEWRSVFEDGEIFADKLTEVEWLTDEQRSALVKKRY |
| | KGWGRLSKKLLTGIVDENGQRIIDLMWNTDQNFKEIVDQPVFKEQIDQL |
| | NQKAITNDGMTLRERVESVLDDAYTSPQNKKAIWQVVRVVEDIVKAVG |
| | NAPKSISIEFARNEGNKGEITRSRRTQLQKLFEDQAHELVKDTSLTEELEK |
| | APDLSDRYYFYFTQGGKDMYTGDPINFDEISTKYDIDHILPQSFVKDNSL |
| | DNRVLTSRKENNKKSDQVPAKLYAAKMKPYWNQLLKQGLITQRKFEN |
| | LTKDVDQNIKYRSLGFVKRQLVETRQVIKLTANILGSMYQEAGTEIIETR |
| | AGLTKQLREEFDLPKVREVNDYHHAVDAYLTTFAGQYLNRRYPKLRSF |
| | FVYGEYMKFKHGSDLKLRNFNFFHELMEGDKSQGKVVDQQTGELITTR |
| | DEVAKSFDRLLNMKYMLVSKEVHDRSDQLYGATIVTAKESGKLTSPIEI |
| | KKNRLVDLYGAYTNGTSAFMTIIKFTGNKPKYKVIGIPTTSAASLKRAGK |
| | PGSESYNQELHRIIKSNPKVKKGFEIVVPHVSYGQLIVDGDCKFTLASPTV |
| | QHPATQLVLSKKSLETISSGYKILKDKPAIANERLIRVFDEVVGQMNRYF |
| | TIFDQRSNRQKVADARDKFLSLPTESKYEGAKKVQVGKTEVITNLLMGL |
| | HANATQGDLKVLGLATFGFFQSTTGLSLSEDTMIVYQSPTGLFERRICLK |
| | DI (SEQ ID NO: 19) |
| SaCas9 | MDKKYSIGLDIGTNSVGWAVITDEYKVPSKKFKVLGNTDRHSIKKNLIG |
| Staphylococcus | ALLFDSGETAEATRLKRTARRRYTRRKNRICYLQEIFSNEMAKVDDSFFH |
| aureus | RLEESFLVEEDKKHERHPIFGNIVDEVAYHEKYPTIYHLRKKLVDSTDKA |
| wild type | DLRLIYLALAHMIKFRGHFLIEGDLNPDNSDVDKLFIQLVQTYNQLFEEN |
| GenBank: | PINASGVDAKAILSARLSKSRRLENLIAQLPGEKKNGLFGNLIALSLGLTP |
| AYD60528.1 | NFKSNFDLAEDAKLQLSKDTYDDDLDNLLAQIGDQYADLFLAAKNLSD |
| | AILLSDILRVNTEITKAPLSASMIKRYDEHHQDLTLLKALVRQQLPEKYK |
| | EIFFDQSKNGYAGYIDGGASQEEFYKFIKPILEKMDGTEELLVKLNREDL |
| | LRKQRTFDNGSIPHQIHLGELHAILRRQEDFYPFLKDNREKIEKILTFRIPY |
| | YVGPLARGNSRFAWMTRKSEETITPWNFEEVVDKGASAQSFIERMTNFD |
| | KNLPNEKVLPKHSLLYEYFTVYNELTKVKYVTEGMRKPAFLSGEQKKAI |
| | VDLLFKTNRKVTVKQLKEDYFKKIECFDSVEISGVEDRFNASLGTYHDL |
| | LKIIKDKDFLDNEENEDILEDIVLTLTLFEDREMIEERLKTYAHLFDDKVM |
| | KQLKRRRYTGWGRLSRKLINGIRDKQSGKTILDFLKSDGFANRNFMQLI |
| | HDDSLTFKEDIQKAQVSGQGDSLHEHIANLAGSPAIKKGILQTVKVVDEL |
| | VKVMGRHKPENIVIEMARENQTTQKGQKNSRERMKRIEEGIKELGSQIL |
| | KEHPVENTQLQNEKLYLYYLQNGRDMYVDQELDINRLSDYDVDHIVPQ |
| | SFLKDDSIDNKVLTRSDKNRGKSDNVPSEEVVKKMKNYWRQLLNAKLI |
| | TQRKFDNLTKAERGGLSELDKAGFIKRQLVETRQITKHVAQILDSRMNT |
| | KYDENDKLIREVKVITLKSKLVSDFRKDFQFYKVREINNYHHAHDAYLN |
| | AVVGTALIKKYPKLESEFVYGDYKVYDVRKMIAKSEQEIGKATAKYFFY |
| | SNIMNFFKTEITLANGEIRKRPLIETNGETGEIVWDKGRDFATVRKVLSM |
| | PQVNIVKKTEVQTGGFSKESILPKRNSDKLIARKKDWDPKKYGGFDSPT |
| | VAYSVLVVAKVEKGKSKKLKSVKELLGITIMERSSFEKNPIDFLEAKGYK |
| | EVKKDLIIKLPKYSLFELENGRKRMLASAGELQKGNELALPSKYVNFLY |
| | LASHYEKLKGSPEDNEQKQLFVEQHKHYLDEIIEQISEFSKRVILADANL |
| | DKVLSAYNKHRDKPIREQAENIIHLFTLTNLGAPAAFKYFDTTIDRKRYT |
| | STKEVLDATLIHQSITGLYETRIDLSQLGGD (SEQ ID NO: 20) |
| SaCas9 | MGKRNYILGLDIGITSVGYGIIDYETRDVIDAGVRLFKEANVENNEGRRS |
| Staphylococcus | KRGARRLKRRRRHRIQRVKKLLFDYNLLTDHSELSGINPYEARVKGLSQ |
| aureus | KLSEEEFSAALLHLAKRRGVHNVNEVEEDTGNELSTKEQISRNSKALEE |
| | KYVAELQLERLKKDGEVRGSINRFKTSDYVKEAKQLLKVQKAYHQLDQ |
| | SFIDTYIDLLETRRTYYEGPGEGSPFGWKDIKEWYEMLMGHCTYFPEELR |
| | SVKYAYNADLYNALNDLNNLVITRDENEKLEYYEKFQIIENVFKQKKKP |
| | TLKQIAKEILVNEEDIKGYRVTSTGKPEFTNLKVYHDIKDITARKEIIENA |
| | ELLDQIAKILTIYQSSEDIQEELTNLNSELTQEEIEQISNLKGYTGTHNLSL |
| | KAINLILDELWHTNDNQIAIFNRLKLVPKKVDLSQQKEIPTTLVDDFILSP |
| | VVKRSFIQSIKVINAIIKKYGLPNDIIIELAREKNSKDAQKMINEMQKRNR |
| | QTNERIEEIIRTTGKENAKYLIEKIKLHDMQEGKCLYSLEAIPLEDLLNNP |
| | FNYEVDHIIPRSVSFDNSFNNKVLVKQEENSKKGNRTPFQYLSSSDSKISY |
| | ETFKKHILNLAKGKGRISKTKKEYLLEERDINRFSVQKDFINRNLVDTRY |
| | ATRGLMNLLRSYFRVNNLDVKVKSINGGFTSFLRRKWKFKKERNKGYK |
| | HHAEDALIIANADFIFKEWKKLDKAKKVMENQMFEEKQAESMPEIETEQ |
| | EYKEIFITPHQIKHIKDFKDYKYSHRVDKKPNRKLINDTLYSTRKDDKGN |
| | TLIVNNLNGLYDKDNDKLKKLINKSPEKLLMYHHDPQTYQKLKLIMEQ |
| | YGDEKNPLYKYYEETGNYLTKYSKKDNGPVIKKIKYYGNKLNAHLDIT |
| | DDYPNSRNKVVKLSLKPYRFDVYLDNGVYKFVTVKNLDVIKKENYYEV |
| | NSKCYEEAKKLKKISNQAEFIASFYKNDLIKINGELYRVIGVNNDLLNRIE |
| | VNMIDITYREYLENMNDKRPPHIIKTIASKTQSIKKYSTDILGNLYEVKSK |
| | KHPQIIKK (SEQ ID NO: 21) |
| StCas9 | MLFNKCIIISINLDFSNKEKCMTKPYSIGLDIGTNSVGWAVITDNYKVPSK |
| Streptococcus | KMKVLGNTSKKYIKKNLLGVLLFDSGITAEGRRLKRTARRRYTRRRNRI |
| thermophilus | LYLQEIFSTEMATLDDAFFQRLDDSFLVPDDKRDSKYPIFGNLVEEKVYH |
| UniProtKB/ | DEFPTIYHLRKYLADSTKKADLRLVYLALAHMIKYRGHFLIEGEFNSKN |
| Swiss-Prot: | NDIQKNFQDFLDTYNAIFESDLSLENSKQLEEIVKDKISKLEKKDRILKLF |
| G3ECR1.2 | PGEKNSGIFSEFLKLIVGNQADFRKCFNLDEKASLHFSKESYDEDLETLL |
| Wild type | GYIGDDYSDVFLKAKKLYDAILLSGFLTVTDNETEAPLSSAMIKRYNEH |
| | KEDLALLKEYIRNISLKTYNEVFKDDTKNGYAGYIDGKTNQEDFYVYLK |
| | NLLAEFEGADYFLEKIDREDFLRKQRTFDNGSIPYQIHLQEMRAILDKQA |
| | KFYPFLAKNKERIEKILTFRIPYYVGPLARGNSDFAWSIRKRNEKITPWNF |
| | EDVIDKESSAEAFINRMTSFDLYLPEEKVLPKHSLLYETFNVYNELTKVR |
| | FIAESMRDYQFLDSKQKKDIVRLYFKDKRKVTDKDIIEYLHAIYGYDGIE |
| | LKGIEKQFNSSLSTYHDLLNIINDKEFLDDSSNEAIIEEIIHTLTIFEDREMIK |
| | QRLSKFENIFDKSVLKKLSRRHYTGWGKLSAKLINGIRDEKSGNTILDYLI |
| | DDGISNRNFMQLIHDDALSFKKKIQKAQIIGDEDKGNIKEVVKSLPGSPAI |
| | KKGILQSIKIVDELVKVMGGRKPESIVVEMARENQYTNQGKSNSQQRLK |
| | RLEKSLKELGSKILKEMPAKLSKIDNNALQNDRLYLYYLQNGKDMYTG |
| | DDLDIDRLSNYDIDHIIPQAFLKDNSIDNKVLVSSASNRGKSDDFPSLEVV |
| | KKRKTFWYQLLKSKLISQRKFDNLTKAERGGLLPEDKAGFIQRQLVETR |
| | QITKHVARLLDEKFNNKKDENNRAVRTVKIITLKSTLVSQFRKDFELYK |
| | VREINDFHHAHDAYLNAVIASALLKKYPKLEPEFVYGDYPKYNSFRERK |
| | SATEKVYFYSNIMNIFKKSISLADGRVIERPLIEVNEETGESVWNKESDLA |
| | TVRRVLSYPQVNVVKKVEEQNHGLDRGKPKGLFNANLSSKPKPNSNEN |
| | LVGAKEYLDPKKYGGYAGISNSFAVLVKGTIEKGAKKKITNVLEFQGISI |
| | LDRINYRKDKLNFLLEKGYKDIELIIELPKYSLFELSDGSRRMLASILSTN |
| | NKRGEIHKGNQIFLSQKFVKLLYHAKRISNTINENHRKYVENHKKEFEEL |
| | FYYILEFNENYVGAKKNGKLLNSAFQSWQNHSIDELCSSFIGPTGSERKG |
| | LFELTSRGSAADFEFLGVKIPRYRDYTPSSLLKDATLIHQSVTGLYETRID |
| | LAKLGEG (SEQ ID NO: 22) |
| LcCas9 | MKIKNYNLALTPSTSAVGHVEVDDDLNILEPVHHQKAIGVAKFGEGETA |
| Lactobacillus | EARRLARSARRTTKRRANRINHYFNEIMKPEIDKVDPLMFDRIKQAGLSP |
| crispatus | LDERKEFRTVIFDRPNIASYYHNQFPTIWHLQKYLMITDEKADIRLIYWA |
| NCBI | LHSLLKHRGHFFNTTPMSQFKPGKLNLKDDMLALDDYNDLEGLSFAVA |
| Reference | NSPEIEKVIKDRSMHKKEKIAELKKLIVNDVPDKDLAKRNNKIITQIVNAI |
| Sequence: | MGNSFHLNFIFDMDLDKLTSKAWSFKLDDPELDTKFDAISGSMTDNQIGI |
| WP_133478 | FETLQKIYSAISLLDILNGSSNVVDAKNALYDKHKRDLNLYFKFLNTLPD |
| 044.1 | EIAKTLKAGYTLYIGNRKKDLLAARKLLKVNVAKNFSQDDFYKLINKEL |
| Wild type | KSIDKQGLQTRFSEKVGELVAQNNFLPVQRSSDNVFIPYQLNAITFNKILE |
| | NQGKYYDFLVKPNPAKKDRKNAPYELSQLMQFTIPYYVGPLVTPEEQV |
| | KSGIPKTSRFAWMVRKDNGAITPWNFYDKVDIEATADKFIKRSIAKDSY |
| | LLSELVLPKHSLLYEKYEVFNELSNVSLDGKKLSGGVKQILFNEVFKKTN |
| | KVNTSRILKALAKHNIPGSKITGLSNPEEFTSSLQTYNAWKKYFPNQIDNF |
| | AYQQDLEKMIEWSTVFEDHKILAKKLDEIEWLDDDQKKFVANTRLRGW |
| | GRLSKRLLTGLKDNYGKSIMQRLETTKANFQQIVYKPEFREQIDKISQAA |
| | AKNQSLEDILANSYTSPSNRKAIRKTMSVVDEYIKLNHGKEPDKIFLMFQ |
| | RSEQEKGKQTEARSKQLNRILSQLKADKSANKLFSKQLADEFSNAIKKS |
| | KYKLNDKQYFYFQQLGRDALTGEVIDYDELYKYTVLHIIPRSKLTDDSQ |
| | NNKVLTKYKIVDGSVALKFGNSYSDALGMPIKAFWTELNRLKLIPKGKL |
| | LNLTTDFSTLNKYQRDGYIARQLVETQQIVKLLATIMQSRFKHTKIIEVR |
| | NSQVANIRYQFDYFRIKNLNEYYRGFDAYLAAVVGTYLYKVYPKARRL |
| | FVYGQYLKPKKTNQENQDMHLDSEKKSQGFNFLWNLLYGKQDQIFVN |
| | GTDVIAFNRKDLITKMNTVYNYKSQKISLAIDYHNGAMFKATLFPRNDR |
| | DTAKTRKLIPKKKDYDTDIYGGYTSNVDGYMLLAEIIKRDGNKQYGFYG |
| | VPSRLVSELDTLKKTRYTEYEEKLKEIIKPELGVDLKKIKKIKILKNKVPF |
| | NQVIIDKGSKFFITSTSYRWNYRQLILSAESQQTLMDLVVDPDFSNHKAR |
| | KDARKNADERLIKVYEEILYQVKNYMPMFVELHRCYEKLVDAQKTFKS |
| | LKISDKAMVLNQILILLHSNATSPVLEKLGYHTRFTLGKKHNLISENAVL |
| | VTQSITGLKENHVSIKQML (SEQ ID NO: 23) |
| PdCas9 | MTNEKYSIGLDIGTSSIGFAVVNDNNRVIRVKGKNAIGVRLFDEGKAAA |
| Pedicoccus | DRRSFRTTRRSFRTTRRRLSRRRWRLKLLREIFDAYITPVDEAFFIRLKES |
| damnosus | NLSPKDSKKQYSGDILFNDRSDKDFYEKYPTIYHLRNALMTEHRKFDVR |
| NCBI | EIYLAIHHIMKFRGHFLNATPANNFKVGRLNLEEKFEELNDIYQRVFPDE |
| Reference | SIEFRTDNLEQIKEVLLDNKRSRADRQRTLVSDIYQSSEDKDIEKRNKAV |
| Sequence: | ATEILKASLGNKAKLNVITNVEVDKEAAKEWSITFDSESIDDDLAKIEGQ |
| WP_062913 | MTDDGHEIIEVLRSLYSGITLSAIVPENHTLSQSMVAKYDLHKDHLKLFK |
| 273.1 | KLINGMTDTKKAKNLRAAYDGYIDGVKGKVLPQEDFYKQVQVNLDDS |
| Wild type | AEANEIQTYIDQDIFMPKQRTKANGSIPHQLQQQELDQIIENQKAYYPWL |
| | AELNPNPDKKRQQLAKYKLDELVTFRVPYYVGPMITAKDQKNQSGAEF |
| | AWMIRKEPGNITPWNFDQKVDRMATANQFIKRMTTTDTYLLGEDVLPA |
| | QSLLYQKFEVLNELNKIRIDHKPISIEQKQQIFNDLFKQFKNVTIKHLQDY |
| | LVSQGQYSKRPLIEGLADEKRFNSSLSTYSDLCGIFGAKLVEENDRQEDL |
| | EKIIEWSTIFEDKKIYRAKLNDLTWLTDDQKEKLATKRYQGWGRLSRKL |
| | LVGLKNSEHRNIMDILWITNENFMQIQAEPDFAKLVTDANKGMLEKTDS |
| | QDVINDLYTSPQNKKAIRQILLVVHDIQNAMHGQAPAKIHVEFARGEER |
| | NPRRSVQRQRQVEAAYEKVSNELVSAKVRQEFKEAINNKRDFKDRLFL |
| | YFMQGGIDIYTGKQLNIDQLSSYQIDHILPQAFVKDDSLTNRVLTNENQV |
| | KADSVPIDIFGKKMLSVWGRMKDQGLISKGKYRNLTMNPENISAHTENG |
| | FINRQLVETRQVIKLAVNILADEYGDSTQIISVKADLSHQMREDFELLKN |
| | RDVNDYHHAFDAYLAAFIGNYLLKRYPKLESYFVYGDFKKFTQKETKM |
| | RRFNFIYDLKHCDQVVNKETGEILWTKDEDIKYIRHLFAYKKILVSHEVR |
| | EKRGALYNQTIYKAKDDKGSGQESKKLIRIKDDKETKIYGGYSGKSLAY |
| | MTIVQITKKNKVSYRVIGIPTLALARLNKLENDSTENNGELYKIIKPQFTH |
| | YKVDKKNGEIIETTDDFKIVVSKVRFQQLIDDAGQFFMLASDTYKNNAQ |
| | QLVISNNALKAINNTNITDCPRDDLERLDNLRLDSAFDEIVKKMDKYFSA |
| | YDANNFREKIRNSNLIFYQLPVEDQWENNKITELGKRTVLTRILQGLHAN |
| | ATTTDMSIFKIKTPFGQLRQRSGISLSENAQLIYQSPTGLFERRVQLNKIK |
| | (SEQ ID NO: 24) |
| FnCas9 | MKKQKFSDYYLGFDIGTNSVGWCVTDLDYNVLRFNKKDMWGSRLFEE |
| Fusobaterium | AKTAAERRVQRNSRRRLKRRKWRLNLLEEIFSNEILKIDSNFFRRLKESSL |
| nucleatum | WLEDKSSKEKFTLFNDDNYKDYDFYKQYPTIFHLRNELIKNPEKKIARLV |
| NCBI | YLAIHSIFKSRGHFLFEGQNLKEIKNFETLYNNLIAFLEDNGINKIIDKNNI |
| Reference | EKLEKIVCDSKKGLKDKEKEFKEIFNSDKQLVAIFKLSVGSSVSLNDLFD |
| Sequence: | TDEYKKGEVEKEKISFREQIYEDDKPIYYSILGEKIELLDIAKTFYDFMVL |
| WP_060798 | NNILADSQYISEAKVKLYEEHKKDLKNLKYIIRKYNKGNYDKLFKDKNE |
| 984.1 | NNYSAYIGLNKEKSKKEVIEKSRLKIDDLIKNIKGYLPKVEEIEEKDKAIF |
| | NKILNKIELKTILPKQRISDNGTLPYQIHEAELEKILENQSKYYDFLNYEE |
| | NGIITKDKLLMTFKFRIPYYVGPLNSYHKDKGGNSWIVRKEEGKILPWNF |
| | EQKVDIEKSAEEFIKRMTNKCTYLNGEDVIPKDTFLYSEYVILNELNKVQ |
| | VNDEFLNEENKRKIIDELFKENKKVSEKKFKEYLLVKQIVDGTIELKGVK |
| | DSFNSNYISYIRFKDIFGEKLNLDIYKEISEKSILWKCLYGDDKKIFEKKIK |
| | NEYGDILTKDEIKKINTFKFNNWGRLSEKLLTGIEFINLETGECYSSVMDA |
| | LRRTNYNLMELLSSKFTLQESINNENKEMNEASYRDLIEESYVSPSLKRAI |
| | FQTLKIYEEIRKITGRVPKKVFIEMARGGDESMKNKKIPARQEQLKKLYD |
| | SCGNDIANFSIDIKEMKNSLISYDNNSLRQKKLYLYYLQFGKCMYTGREI |
| | DLDRLLQNNDTYDIDHIYPRSKVIKDDSFDNLVLVLKNENAEKSNEYPV |
| | KKEIQEKMKSFWRFLKEKNFISDEKYKRLTGKDDFELRGFMARQLVNV |
| | RQTTKEVGKILQQIEPEIKIVYSKAEIASSFREMFDFIKVRELNDTHHAKD |
| | AYLNIVAGNVYNTKFTEKPYRYLQEIKENYDVKKIYNYDIKNAWDKEN |
| | SLEIVKKNMEKNTVNITRFIKEKKGQLFDLNPIKKGETSNEIISIKPKVYN |
| | GKDDKLNEKYGYYKSLNPAYFLYVEHKEKNKRIKSFERVNLVDVNNIK |
| | DEKSLVKYLIENKKLVEPRVIKKVYKRQVILINDYPYSIVTLDSNKLMDF |
| | ENLKPLFLENKYEKILKNVIKFLEDNQGKSEENYKFIYLKKKDRYEKNET |
| | LESVKDRYNLEFNEMYDKFLEKLDSKDYKNYMNNKKYQELLDVKEKFI |
| | KLNLFDKAFTLKSFLDLFNRKTMADFSKVGLTKYLGKIQKISSNVLSKNE |
| | LYLLEESVTGLFVKKIKL (SEQ ID NO: 25) |
| EcCas9 | RRKQRIQILQELLGEEVLKTDPGFFHRMKESRYVVEDKRTLDGKQVELP |
| Enterococcus | YALFVDKDYTDKEYYKQFPTINHLIVYLMTTSDTPDIRLVYLALHYYMK |
| cecorum | NRGNFLHSGDINNVKDINDILEQLDNVLETFLDGWNLKLKSYVEDIKNIY |
| NCBI | NRDLGRGERKKAFVNTLGAKTKAEKAFCSLISGGSTNLAELFDDSSLKEI |
| Reference | ETPKIEFASSSLEDKIDGIQEALEDRFAVIEAAKRLYDWKTLTDILGDSSS |
| Sequence: | LAEARVNSYQMHHEQLLELKSLVKEYLDRKVFQEVFVSLNVANNYPAY |
| WP_047338 | IGHTKINGKKKELEVKRTKRNDFYSYVKKQVIEPIKKKVSDEAVLTKLSE |
| 501.1 | IESLIEVDKYLPLQVNSDNGVIPYQVKLNELTRIFDNLENRIPVLRENRDK |
| Wild type | IIKTFKFRIPYYVGSLNGVVKNGKCTNWMVRKEEGKIYPWNFEDKVDLE |
| | ASAEQFIRRMTNKCTYLVNEDVLPKYSLLYSKYLVLSELNNLRIDGRPLD |
| | VKIKQDIYENVFKKNRKVTLKKIKKYLLKEGIITDDDELSGLADDVKSSL |
| | TAYRDFKEKLGHLDLSEAQMENIILNITLFGDDKKLLKKRLAALYPFIDD |
| | KSLNRIATLNYRDWGRLSERFLSGITSVDQETGELRTIIQCMYETQANLM |
| | QLLAEPYHFVEAIEKENPKVDLESISYRIVNDLYVSPAVKRQIWQTLLVIK |
| | DIKQVMKHDPERIFIEMAREKQESKKTKSRKQVLSEVYKKAKEYEHLFE |
| | KLNSLTEEQLRSKKIYLYFTQLGKCMYSGEPIDFENLVSANSNYDIDHIYP |
| | QSKTIDDSFNNIVLVKKSLNAYKSNHYPIDKNIRDNEKVKTLWNTLVSK |
| | GLITKEKYERLIRSTPFSDEELAGFIARQLVETRQSTKAVAEILSNWFPESE |
| | IVYSKAKNVSNFRQDFEILKVRELNDCHHAHDAYLNIVVGNAYHTKFTN |
| | SPYRFIKNKANQEYNLRKLLQKVNKIESNGVVAWVGQSENNPGTIATVK |
| | KVIRRNTVLISRMVKEVDGQLFDLTLMKKGKGQVPIKSSDERLTDISKY |
| | GGYNKATGAYFTFVKSKKRGKVVRSFEYVPLHLSKQFENNNELLKEYIE |
| | KDRGLTDVEILIPKVLINSLFRYNGSLVRITGRGDTRLLLVHEQPLYVSNS |
| | FVQQLKSVSSYKLKKSENDNAKLTKTATEKLSNIDELYDGLLRKLDLPIY |
| | SYWFSSIKEYLVESRTKYIKLSIEEKALVIFEILHLFQSDAQVPNLKILGLS |
| | TKPSRIRIQKNLKDTDKMSIIHQSPSGIFEHEIELTSL (SEQ ID NO: 26) |
| AhCas9 | MQNGFLGITVSSEQVGWAVTNPKYELERASRKDLWGVRLFDKAETAED |
| Anaerostipes | RRMFRTNRRLNQRKKNRIHYLRDIFHEEVNQKDPNFFQQLDESNFCEDD |
| hadrus | RTVEFNFDTNLYKNQFPTVYHLRKYLMETKDKPIARLVYLAFSKFMKN |
| NCBI | RGHFLYKGNLGEVMDFENSMKGFCESLEKFNIDFPTLSDEQVKEVRDIL |
| Reference | CDHKIAKTVKKKNIITITKVKSKTAKAWIGLFCGCSVPVKVLFQDIDEEIV |
| Sequence: | TDPEKISFEDASYDDYIANIEKGVGIYYEAIVSAKMLFDWSILNEILGDHQ |
| WP_044924 | LLSDAMIAEYNKHHDDLKRLQKIIKGTGSRELYQDIFINDVSGNYVCYV |
| 278.1 | GHAKTMSSADQKQFYTFLKNRLKNVNGISSEDAEWIDTEIKNGTLLPKQ |
| Wild type | TKRDNSVIPHQLQLREFELILDNMQEMYPFLKENREKLLKIFNFVIPYYV |
| | GPLKGVVRKGESTNWMVPKKDGVIHPWNFDEMVDKEASAECFISRMT |
| | GNCSYLFNEKVLPKNSLLYETFEVLNELNPLKINGEPISVELKQRIYEQLF |
| | LTGKKVTKKSLTKYLIKNGYDKDIELSGIDNEFHSNLKSHIDFEDYDNLS |
| | DEEVEQIILRITVFEDKQLLKDYLNREFVKLSEDERKQICSLSYKGWGNL |
| | SEMLLNGITVTDSNGVEVSVMDMLWNTNLNLMQILSKKYGYKAEIEHY |
| | NKEHEKTIYNREDLMDYLNIPPAQRRKVNQLITIVKSLKKTYGVPNKIFF |
| | KISREHQDDPKRTSSRKEQLKYLYKSLKSEDEKHLMKELDELNDHELSN |
| | DKVYLYFLQKGRCIYSGKKLNLSRLRKSNYQNDIDYIYPLSAVNDRSMN |
| | NKVLTGIQENRADKYTYFPVDSEIQKKMKGFWMELVLQGFMTKEKYFR |
| | LSRENDFSKSELVSFIEREISDNQQSGRMIASVLQYYFPESKIVFVKEKLIS |
| | SFKRDFHLISSYGHNHLQAAKDAYITIVVGNVYHTKFTMDPAIYFKNHK |
| | RKDYDLNRLFLENISRDGQIAWESGPYGSIQTVRKEYAQNHIAVTKRVV |
| | EVKGGLFKQMPLKKGHGEYPLKTNDPRFGNIAQYGGYTNVTGSYFVLV |
| | ESMEKGKKRISLEYVPVYLHERLEDDPGHKLLKEYLVDHRKLNHPKILL |
| | AKVRKNSLLKIDGFYYRLNGRSGNALILTNAVELIMDDWQTKTANKISG |
| | YMKRRAIDKKARVYQNEFHIQELEQLYDFYLDKLKNGVYKNRKNNQA |
| | ELIHNEKEQFMELKTEDQCVLLTEIKKLFVCSPMQADLTLIGGSKHTGMI |
| | AMSSNVTKADFAVIAEDPLGLRNKVIYSHKGEK (SEQ ID NO: 27) |
| KvCas9 | MSQNNNKIYNIGLDIGDASVGWAVVDEHYNLLKRHGKHMWGSRLFTQ |
| Kandleria | ANTAVERRSSRSTRRRYNKRRERIRLLREIMEDMVLDVDPTFFIRLANVS |
| vitulina | FLDQEDKKDYLKENYHSNYNLFIDKDFNDKTYYDKYPTIYHLRKHLCES |
| NCBI | KEKEDPRLIYLALHHIVKYRGNFLYEGQKFSMDVSNIEDKMIDVLRQFN |
| Reference | EINLFEYVEDRKKIDEVLNVLKEPLSKKHKAEKAFALFDTTKDNKAAYK |
| Sequence: | ELCAALAGNKFNVTKMLKEAELHDEDEKDISFKFSDATFDDAFVEKQPL |
| WP_031589 | LGDCVEFIDLLHDIYSWVELQNILGSAHTSEPSISAAMIQRYEDHKNDLK |
| 969.1 | LLKDVIRKYLPKKYFEVFRDEKSKKNNYCNYINHPSKTPVDEFYKYIKK |
| Wild type | LIEKIDDPDVKTILNKIELESFMLKQNSRTNGAVPYQMQLDELNKILENQ |
| | SVYYSDLKDNEDKIRSILTFRIPYYFGPLNITKDRQFDWIIKKEGKENERIL |
| | PWNANEIVDVDKTADEFIKRMRNFCTYFPDEPVMAKNSLTVSKYEVLN |
| | EINKLRINDHLIKRDMKDKMLHTLFMDHKSISANAMKKWLVKNQYFSN |
| | TDDIKIEGFQKENACSTSLTPWIDFTKIFGKINESNYDFIEKIIYDVTVFED |
| | KKILRRRLKKEYDLDEEKIKKILKLKYSGWSRLSKKLLSGIKTKYKDSTR |
| | TPETVLEVMERTNMNLMQVINDEKLGFKKTIDDANSTSVSGKFSYAEVQ |
| | ELAGSPAIKRGIWQALLIVDEIKKIMKHEPAHVYIEFARNEDEKERKDSF |
| | VNQMLKLYKDYDFEDETEKEANKHLKGEDAKSKIRSERLKLYYTQMG |
| | KCMYTGKSLDIDRLDTYQVDHIVPQSLLKDDSIDNKVLVLSSENQRKLD |
| | DLVIPSSIRNKMYGFWEKLFNNKIISPKKFYSLIKTEFNEKDQERFINRQIV |
| | ETRQITKHVAQIIDNHYENTKVVTVRADLSHQFRERYHIYKNRDINDFHH |
| | AHDAYIATILGTYIGHRFESLDAKYIYGEYKRIFRNQKNKGKEMKKNND |
| | GFILNSMRNIYADKDTGEIVWDPNYIDRIKKCFYYKDCFVTKKLEENNG |
| | TFFNVTVLPNDTNSDKDNTLATVPVNKYRSNVNKYGGFSGVNSFIVAIK |
| | GKKKKGKKVIEVNKLTGIPLMYKNADEEIKINYLKQAEDLEEVQIGKEIL |
| | KNQLIEKDGGLYYIVAPTEIINAKQLILNESQTKLVCEIYKAMKYKNYDN |
| | LDSEKIIDLYRLLINKMELYYPEYRKQLVKKFEDRYEQLKVISIEEKCNII |
| | KQILATLHCNSSIGKIMYSDFKISTTIGRLNGRTISLDDISFIAESPTGMYSK |
| | KYKL (SEQ ID NO: 28) |
| EfCas9 | MRLFEEGHTAEDRRLKRTARRRISRRRNRLRYLQAFFEEAMTDLDENFF |
| Enterococcus | ARLQESFLVPEDKKWHRHPIFAKLEDEVAYHETYPTIYHLRKKLADSSE |
| faecalis | QADLRLIYLALAHIVKYRGHFLIEGKLSTENTSVKDQFQQFMVIYNQTFV |
| NCBI | NGESRLVSAPLPESVLIEEELTEKASRTKKSEKVLQQFPQEKANGLFGQF |
| Reference | LKLMVGNKADFKKVFGLEEEAKITYASESYEEDLEGILAKVGDEYSDVF |
| Sequence: | LAAKNVYDAVELSTILADSDKKSHAKLSSSMIVRFTEHQEDLKKFKRFIR |
| WP_016631 | ENCPDEYDNLFKNEQKDGYAGYIAHAGKVSQLKFYQYVKKIIQDIAGAE |
| 044.1 | YFLEKIAQENFLRKQRTFDNGVIPHQIHLAELQAIIHRQAAYYPFLKENQE |
| Wild type | KIEQLVTFRIPYYVGPLSKGDASTFAWLKRQSEEPIRPWNLQETVDLDQS |
| | ATAFIERMTNFDTYLPSEKVLPKHSLLYEKFMVFNELTKISYTDDRGIKA |
| | NFSGKEKEKIFDYLFKTRRKVKKKDIIQFYRNEYNTEIVTLSGLEEDQFN |
| | ASFSTYQDLLKCGLTRAELDHPDNAEKLEDIIKILTIFEDRQRIRTQLSTFK |
| | GQFSAEVLKKLERKHYTGWGRLSKKLINGIYDKESGKTILDYLVKDDGV |
| | SKHYNRNFMQLINDSQLSFKNAIQKAQSSEHEETLSETVNELAGSPAIKK |
| | GIYQSLKIVDELVAIMGYAPKRIVVEMARENQTTSTGKRRSIQRLKIVEK |
| | AMAEIGSNLLKEQPTTNEQLRDTRLFLYYMQNGKDMYTGDELSLHRLS |
| | HYDIDHIIPQSFMKDDSLDNLVLVGSTENRGKSDDVPSKEVVKDMKAY |
| | WEKLYAAGLISQRKFQRLTKGEQGGLTLEDKAHFIQRQLVETRQITKNV |
| | AGILDQRYNAKSKEKKVQIITLKASLTSQFRSIFGLYKVREVNDYHHGQD |
| | AYLNCVVATTLLKVYPNLAPEFVYGEYPKFQTFKENKATAKAIIYTNLL |
| | RFFTEDEPRFTKDGEILWSNSYLKTIKKELNYHQMNIVKKVEVQKGGFS |
| | KESIKPKGPSNKLIPVKNGLDPQKYGGFDSPVVAYTVLFTHEKGKKPLIK |
| | QEILGITIMEKTRFEQNPILFLEEKGFLRPRVLMKLPKYTLYEFPEGRRRL |
| | LASAKEAQKGNQMVLPEHLLTLLYHAKQCLLPNQSESLAYVEQHQPEF |
| | QEILERVVDFAEVHTLAKSKVQQIVKLFEANQTADVKEIAASFIQLMQFN |
| | AMGAPSTFKFFQKDIERARYTSIKEIFDATIIYQSPTGLYETRRKVVD |
| | (SEQ ID NO: 29) |
| Staphylococcus | KRNYILGLDIGITSVGYGIIDYETRDVIDAGVRLFKEANVENNEGRRSKR |
| aureus | GARRLKRRRRHRIQRVKKLLFDYNLLTDHSELSGINPYEARVKGLSQKL |
| Cas9 | SEEEFSAALLHLAKRRGVHNVNEVEEDTGNELSTKEQISRNSKALEEKY |
| | VAELQLERLKKDGEVRGSINTRFKTSDYVKEAKQLLKVQKAYHQLDQSFI |
| | DTYIDLLETRRTYYEGPGEGSPFGWKDIKEWYEMLMGHCTYFPEELRSV |
| | KYAYNADLYNALNDLNNLVITRDENEKLEYYEKFQIIENVFKQKKKPTL |
| | KQIAKEILVNEEDIKGYRVTSTGKPEFTNLKVYHDIKDITARKEIIENAEL |
| | LDQIAKILTIYQSSEDIQEELTNLNSELTQEEIEQISNLKGYTGTHNLSLKAI |
| | NLILDELWHTNDNQIAIFNRLKLVPKKVDLSQQKEIPTTLVDDFILSPVVK |
| | RSFIQSIKVINAIIKKYGLPNDIIIELAREKNSKDAQKMINEMQKRNRQTN |
| | ERIEEIIRTTGKENAKYLIEKIKLHDMQEGKCLYSLEAIPLEDLLNNPFNY |
| | EVDHIIPRSVSFDNSFNNKVLVKQEENSKKGNRTPFQYLSSSDSKISYETF |
| | KKHILNLAKGKGRISKTKKEYLLEERDINRFSVQKDFINRNLVDTRYATR |
| | GLMNLLRSYFRVNNLDVKVKSINGGFTSFLRRKWKFKKERNKGYKHHA |
| | EDALIIANADFIFKEWKKLDKAKKVMENQMFEEKQAESMPEIETEQEYK |
| | EIFITPHQIKHIKDFKDYKYSHRVDKKPNRELINDTLYSTRKDDKGNTLIV |
| | NNLNGLYDKDNDKLKKLINKSPEKLLMYHHDPQTYQKLKLIMEQYGDE |
| | KNPLYKYYEETGNYLTKYSKKDNGPVIKKIKYYGNKLNAHLDITDDYP |
| | NSRNKVVKLSLKPYRFDVYLDNGVYKFVTVKNLDVIKKENYYEVNSKC |
| | YEEAKKLKKISNQAEFIASFYNNDLIKINGELYRVIGVNNDLLNRIEVNMI |
| | DITYREYLENMNDKRPPRIIKTIASKTQSIKKYSTDILGNLYEVKSKKHPQ |
| | IIKKG |
| | (SEQ ID NO: 30) |
| Geobacillus | MKYKIGLDIGITSIGWAVINLDIPRIEDLGVRIFDRAENPKTGESLALPRRL |
| thermodenitrificans | ARSARRRLRRRKHRLERIRRLFVREGILTKEELNKLFEKKHEIDVWQLRV |
| Cas9 | EALDRKLNNDELARILLHLAKRRGFRSNRKSERTNKENSTMLKHIEENQ |
| | SILSSYRTVAEMVVKDPKFSLHKRNKEDNYTNTVARDDLEREIKLIFAKQ |
| | REYGNIVCTEAFEHEYISIWASQRPFASKDDIEKKVGFCTFEPKEKRAPK |
| | ATYTFQSFTVWEHINKLRLVSPGGIRALTDDERRLIYKQAFHKNKITFHD |
| | VRTLLNLPDDTRFKGLLYDRNTTLKENEKVRFLELGAYHKIRKAIDSVY |
| | GKGAAKSFRPIDFDTFGYALTMFKDDTDIRSYLRNEYEQNGKRMENLA |
| | DKVYDEELIEELLNLSFSKFGHLSLKALRNILPYMEQGEVYSTACERAGY |
| | TFTGPKKKQKTVLLPNIPPIANPVVMRALTQARKVVNAIIKKYGSPVSIHI |
| | ELARELSQSFDERRKMQKEQEGNRKKNETAIRQLVEYGLTLNPTGLDIV |
| | KFKLWSEQNGKCAYSLQPIEIERLLEPGYTEVDHVIPYSRSLDDSYTNKV |
| | LVLTKENREKGNRTPAEYLGLGSERWQQFETFVLTNKQFSKKKRDRLLR |
| | LHYDENEENEFKNRNLNDTRYISRFLANFIREHLKFADSDDKQKVYTVN |
| | GRITAHLRSRWNFNKNREESNLHHAVDAAIVACTTPSDIARVTAFYQRR |
| | EQNKELSKKTDPQFPQPWPHFADELQARLSKNPKESIKALNLGNYDNEK |
| | LESLQPVFVSRMPKRSITGAAHQETLRRYIGIDERSGKIQTVVKKKLSEIQ |
| | LDKTGHFPMYGKESDPRTYEARQRLLEHNNDPKKAFQEPLYKPKKNGE |
| | LGPIIRTIKIIDTTNQVIPLNDGKTVAYNSNIVRVDVFEKDGKYYCVPIYTI |
| | DMMKGILPNKAIEPNKPYSEWKEMTEDYTFRFSLYPNDLIRIEFPREKTIK |
| | TAVGEEIKIKDLFAYYQTIDSSNGGLSLVSHDNNFSLRSIGSRTLKRFEKY |
| | QVDVLGNIYKVRGEKRVGVASSSHSKAGETIRPL |
| | (SEQ ID NO: 31) |
| ScCas9 | MEKKYSIGLDIGTNSVGWAVITDDYKVPSKKFKVLGNTNRKSIKKNLM |
| S. canis | GALLFDSGETAEATRLKRTARRRYTRRKNRIRYLQEIFANEMAKLDDSF |
| 1375 AA | FQRLEESFLVEEDKKNERHPIFGNLADEVAYHRNYPTIYHLRKKLADSPE |
| 159.2 kDa | KADLRLIYLALAHIIKFRGHFLIEGKLNAENSDVAKLFYQLIQTYNQLFEE |
| | SPLDEIEVDAKGILSARLSKSKRLEKLIAVFPNEKKNGLFGNIIALALGLTP |
| | NFKSNFDLTEDAKLQLSKDTYDDDLDELLGQIGDQYADLFSAAKNLSDA |
| | ILLSDILRSNSEVTKAPLSASMVKRYDEHHQDLALLKTLVRQQFPEKYAE |
| | IFKDDTKNGYAGYVGIGIKHRKRTTKLATQEEFYKFIKPILEKMDGAEEL |
| | LAKLNRDDLLRKQRTFDNGSIPHQIHLKELHAILRRQEEFYPFLKENREKI |
| | EKILTFRIPYYVGPLARGNSRFAWLTRKSEEAITPWNFEEVVDKGASAQS |
| | FIERMTNFDEQLPNKKVLPKHSLLYEYFTVYNELTKVKYVTERMRKPEF |
| | LSGEQKKAIVDLLFKTNRKVTVKQLKEDYFKKIECFDSVEIIGVEDRFNA |
| | SLGTYHDLLKIIKDKDFLDNEENEDILEDIVLTLTLFEDREMIEERLKTYA |
| | HLFDDKVMKQLKRRHYTGWGRLSRKMINGIRDKQSGKTILDFLKSDGF |
| | SNRNFMQLIHDDSLTFKEEIEKAQVSGQGDSLHEQIADLAGSPAIKKGIL |
| | QTVKIVDELVKVMGHKPENIVIEMARENQTTTKGLQQSRERKKRIEEGIK |
| | ELESQILKENPVENTQLQNEKLYLYYLQNGRDMYVDQELDINRLSDYDV |
| | DHIVPQSFIKDDSIDNKVLTRSVENRGKSDNVPSEEVVKKMKNYWRQLL |
| | NAKLITQRKFDNLTKAERGGLSEADKAGFIKRQLVETRQITKHVARILDS |
| | RMNTKRDKNDKPIREVKVITLKSKLVSDFRKDFQLYKVRDINNYHHAH |
| | DAYLNAVVGTALIKKYPKLESEFVYGDYKVYDVRKMIAKSEQEIGKAT |
| | AKRFFYSNIMNFFKTEVKLANGEIRKRPLIETNGETGEVVWNKEKDFAT |
| | VRKVLAMPQVNIVKKTEVQTGGFSKESILSKRESAKLIPRKKGWDTRKY |
| | GGFGSPTVAYSILVVAKVEKGKAKKLKSVKVLVGITIMEKGSYEKDPIGF |
| | LEAKGYKDIKKELIFKLPKYSLFELENGRRRMLASATELQKANELVLPQ |
| | HLVRLLYYTQNISATTGSNNLGYIEQHREEFKEIFEKIIDFSEKYILKNKV |
| | NSNLKSSFDEQFAVSDSILLSNSFVSLLKYTSFGASGGFTFLDLDVKQGRL |
| | RYQTVTEVLDATLIYQSITGLYETRTDLSQLGGD (SEQ ID NO: 32) |

[0114] The genome editing system described herein may include any of the above Cas9 ortholog sequences, or any variants thereof having at least 80%, at least 85%, at least 90%, at least 95%, or at least 99% sequence identity thereto.

[0115] The napDNAbp may include any suitable homologs and/or orthologs or naturally occurring enzymes, such as, Cas9. Cas9 homologs and/or orthologs have been described in various species, including, but not limited to, S. pyogenes and S. thermophilus. Preferably, the Cas moiety is configured (e.g., mutagenized, recombinantly engineered, or otherwise obtained from nature) as a nickase, i.e., capable of cleaving only a single strand of the target doubpdditional suitable Cas9 nucleases and sequences will be apparent to those of skill in the art based on this disclosure, and such Cas9 nucleases and sequences include Cas9 sequences from the organisms and loci disclosed in Chylinski, Rhun, and Charpentier, “The tracrRNA and Cas9 families of type II CRISPR-Cas immunity systems” (2013) RNA Biology 10:5, 726-737; the entire contents of which are incorporated herein by reference. In some embodiments, a Cas9 nuclease has an inactive (e.g., an inactivated) DNA cleavage domain, that is, the Cas9 is a nickase. In some embodiments, the Cas9 protein comprises an amino acid sequence that is at least 80% identical to the amino acid sequence of a Cas9 protein as provided by any one of the variants of Table 3. In some embodiments, the Cas9 protein comprises an amino acid sequence that is at least 85%, at least 90%, at least 92%, at least 95%, at least 96%, at least 97%, at least 98%, at least 99%, or at least 99.5% identical to the amino acid sequence of a Cas9 protein as provided by any one of the Cas9 orthologs in the above tables.

### C. Dead Cas9 Variant

[0116] In certain embodiments, the genome editing system described herein may include a dead Cas9, e.g., dead SpCas9, which has no nuclease activity due to one or more mutations that inactive both nuclease domains of Cas9, namely the RuvC domain (which cleaves the non-protospacer DNA strand) and HNH domain (which cleaves the protospacer DNA strand). The nuclease inactivation may be due to one or mutations that result in one or more substitutions and/or deletions in the amino acid sequence of the encoded protein, or any variants thereof having at least 80%, at least 85%, at least 90%, at least 95%, or at least 99% sequence identity thereto. As used herein, the term “dCas9” refers to a nuclease-inactive Cas9 or nuclease-dead Cas9, or a functional fragment thereof, and embraces any naturally occurring dCas9 from any organism, any naturally-occurring dCas9 equivalent or functional fragment thereof, any dCas9 homolog, ortholog, or paralog from any organism, and any mutant or variant of a dCas9, naturally-occurring or engineered. The term dCas9 is not meant to be particularly limiting and may be referred to as a “dCas9 or equivalent.” Exemplary dCas9 proteins and method for making dCas9 proteins are further described herein and/or are described in the art and are incorporated herein by reference. In other embodiments, dCas9 corresponds to, or comprises in part or in whole, a Cas9 amino acid sequence having one or more mutations that inactivate the Cas9 nuclease activity. In other embodiments, Cas9 variants having mutations other than D10A and H840A are provided which may result in the full or partial inactivate of the endogenous Cas9 nuclease activity (e.g., nCas9 or dCas9, respectively). Such mutations, by way of example, include other amino acid substitutions at D10 and H820, or other substitutions within the nuclease domains of Cas9 (e.g., substitutions in the HNH nuclease subdomain and/or the RuvC1 subdomain) with reference to a wild type sequence such as Cas9 from Streptococcus pyogenes (NCBI Reference Sequence: NC_017053.1 (SEQ ID NO: 14)). In some embodiments, variants or homologues of Cas9 (e.g., variants of Cas9 from Streptococcus pyogenes (NCBI Reference Sequence: NC_017053.1 (SEQ ID NO: 14))) are provided which are at least about 70% identical, at least about 80% identical, at least about 90% identical, at least about 95% identical, at least about 98% identical, at least about 99% identical, at least about 99.5% identical, or at least about 99.9% identical to NCBI Reference Sequence: NC_017053.1 (SEQ ID NO: 14). In some embodiments, variants of dCas9 (e.g., variants of NCBI Reference Sequence: NC_017053.1 (SEQ ID NO: 14)) are provided having amino acid sequences which are shorter, or longer than NC_017053.1 (SEQ ID NO: 14) by about 5 amino acids, by about 10 amino acids, by about 15 amino acids, by about 20 amino acids, by about 25 amino acids, by about 30 amino acids, by about 40 amino acids, by about 50 amino acids, by about 75 amino acids, by about 100 amino acids or more.

[0117] In one embodiment, the dead Cas9 may be based on the canonical SpCas9 sequence of Q99ZW2 and may have the following sequence, which comprises a D10X and an H810X, wherein X may be any amino acid, substitutions (underlined and bolded), or a variant be variant of SEQ ID NO: 11 having at least 80%, at least 85%, at least 90%, at least 95%, or at least 99% sequence identity thereto.

[0118] In one embodiment, the dead Cas9 may be based on the canonical SpCas9 sequence of Q99ZW2 and may have the following sequence, which comprises a D10A and an H810A substitutions (underlined and bolded), or be a variant of SEQ ID NO: 11 having at least 80%, at least 85%, at least 90%, at least 95%, or at least 99% sequence identity thereto.

| Description | Sequence | SEQ ID NO: |
|---|---|---|
| dead Cas9 or | MDKKYSIGLXIGTNSVGWAVITDEYKVPSKKFKVLGNTD | SEQ ID NO: |
| dCas9 | RHSIKKNLIGALLFDSGETAEATRLKRTARRRYTRRKNRI | 33 |
| Streptococcus | CYLQEIFSNEMAKVDDSFFHRLEESFLVEEDKKHERHPIF | |
| pyogenes | GNIVDEVAYHEKYPTIYHLRKKLVDSTDKADLRLIYLAL | |
| Q99ZW2 | AHMIKFRGHFLIEGDLNPDNSDVDKLFIQLVQTYNQLFEE | |
| Cas9 with | NPINASGVDAKAILSARLSKSRRLENLIAQLPGEKKNGLF | |
| D10X and | GNLIALSLGLTPNFKSNFDLAEDAKLQLSKDTYDDDLDN | |
| H810X | LLAQIGDQYADLFLAAKNLSDAILLSDILRVNTEITKAPLS | |
| Where “X” is | ASMIKRYDEHHQDLTLLKALVRQQLPEKYKEIFFDQSKN | |
| any amino | GYAGYIDGGASQEEFYKFIKPILEKMDGTEELLVKLNRE | |
| acid | DLLRKQRTFDNGSIPHQIHLGELHAILRRQEDFYPFLKDN | |
| | REKIEKILTFRIPYYVGPLARGNSRFAWMTRKSEETITPW | |
| | NFEEVVDKGASAQSFIERMTNFDKNLPNEKVLPKHSLLY | |
| | EYFTVYNELTKVKYVTEGMRKPAFLSGEQKKAIVDLLFK | |
| | TNRKVTVKQLKEDYFKKIECFDSVETSGVEDRFNASLGT | |
| | YHDLLKIIKDKDFLDNEENEDILEDIVLTLTLFEDREMIEE | |
| | RLKTYAHLFDDKVMKQLKRRRYTGWGRLSRKLINGIRD | |
| | KQSGKTILDFLKSDGFANRNFMQLIHDDSLTFKEDIQKAQ | |
| | VSGQGDSLHEHIANLAGSPAIKKGILQTVKVVDELVKVM | |
| | GRHKPENIVIEMARENQTTQKGQKNSRERMKRIEEGIKE | |
| | LGSQILKEHPVENTQLQNEKLYLYYLQNGRDMYVDQEL | |
| | DINRLSDYDVDXIVPQSFLKDDSIDNKVLTRSDKNRGKS | |
| | DNVPSEEVVKKMKNYWRQLLNAKLITQRKFDNLTKAER | |
| | GGLSELDKAGFIKRQLVETRQITKHVAQILDSRMNTKYD | |
| | ENDKLIREVKVITLKSKLVSDFRKDFQFYKVREINTNYHH | |
| | AHDAYLNAVVGTALIKKYPKLESEFVYGDYKVYDVRK | |
| | MIAKSEQEIGKATAKYFFYSNIMNFFKTEITLANGEIRKRP | |
| | LIETNGETGEIVWDKGRDFATVRKVLSMPQVNIVKKTEV | |
| | QTGGFSKESILPKRNSDKLIARKKDWDPKKYGGFDSPTV | |
| | AYSVLVVAKVEKGKSKKLKSVKELLGITIMERSSFEKNPI | |
| | DFLEAKGYKEVKKDLIIKLPKYSLFELENGRKRMLASAG | |
| | ELQKGNELALPSKYVNFLYLASHYEKLKGSPEDNEQKQL | |
| | FVEQHKHYLDEIIEQISEFSKRVILADANLDKVLSAYNKH | |
| | RDKPIREQAENIIHLFTLTNLGAPAAFKYFDTTIDRKRYTS | |
| | TKEVLDATLIHQSITGLYETRIDLSQLGGD | |
| dead Cas9 or | MDKKYSIGLAIGTNSVGWAVITDEYKVPSKKFKVLGNTD | SEQ ID NO: |
| dCas9 | RHSIKKNLIGALLFDSGETAEATRLKRTARRRYTRRKNRI | 34 |
| Streptococcus | CYLQEIFSNEMAKVDDSFFHRLEESFLVEEDKKHERHPIF | |
| pyogenes | GNIVDEVAYHEKYPTIYHLRKKLVDSTDKADLRLIYLAL | |
| Q99ZW2 | AHMIKFRGHFLIEGDLNPDNSDVDKLFIQLVQTYNQLFEE | |
| Cas9 with | NPINASGVDAKAILSARLSKSRRLENLIAQLPGEKKNGLF | |
| D10A and | GNLIALSLGLTPNFKSNFDLAEDAKLQLSKDTYDDDLDN | |
| H810A | LLAQIGDQYADLFLAAKNLSDAILLSDILRVNTEITKAPLS | |
| | ASMIKRYDEHHQDLTLLKALVRQQLPEKYKEIFFDQSKN | |
| | GYAGYIDGGASQEEFYKFIKPILEKMDGTEELLVKLNRE | |
| | DLLRKQRTFDNGSIPHQIHLGELHAILRRQEDFYPFLKDN | |
| | REKIEKILTFRIPYYVGPLARGNSRFAWMTRKSEETITPW | |
| | NFEEVVDKGASAQSFIERMTNFDKNLPNEKVLPKHSLLY | |
| | EYFTVYNELTKVKYVTEGMRKPAFLSGEQKKAIVDLLFK | |
| | TNRKVTVKQLKEDYFKKIECFDSVETSGVEDRFNASLGT | |
| | YHDLLKIIKDKDFLDNEENEDILEDIVLTLTLFEDREMIEE | |
| | RLKTYAHLFDDKVMKQLKRRRYTGWGRLSRKLINGIRD | |
| | KQSGKTILDFLKSDGFANRNFMQLIHDDSLTFKEDIQKAQ | |
| | VSGQGDSLHEHIANLAGSPAIKKGILQTVKVVDELVKVM | |
| | GRHKPENIVIEMARENQTTQKGQKNSRERMKRIEEGIKE | |
| | LGSQILKEHPVENTQLQNEKLYLYYLQNGRDMYVDQEL | |
| | DINRLSDYDVDAIVPQSFLKDDSIDNKVLTRSDKNRGKS | |
| | DNVPSEEVVKKMKNYWRQLLNAKLITQRKFDNLTKAER | |
| | GGLSELDKAGFIKRQLVETRQITKHVAQILDSRMNTKYD | |
| | ENDKLIREVKVITLKSKLVSDFRKDFQFYKVREINTNYHH | |
| | AHDAYLNAVVGTALIKKYPKLESEFVYGDYKVYDVRK | |
| | MIAKSEQEIGKATAKYFFYSNIMNFFKTEITLANGEIRKRP | |
| | LIETNGETGEIVWDKGRDFATVRKVLSMPQVNIVKKTEV | |
| | QTGGFSKESILPKRNSDKLIARKKDWDPKKYGGFDSPTV | |
| | AYSVLVVAKVEKGKSKKLKSVKELLGITIMERSSFEKNPI | |
| | DFLEAKGYKEVKKDLIIKLPKYSLFELENGRKRMLASAG | |
| | ELQKGNELALPSKYVNFLYLASHYEKLKGSPEDNEQKQL | |
| | FVEQHKHYLDEIIEQISEFSKRVILADANLDKVLSAYNKH | |
| | RDKPIREQAENIIHLFTLTNLGAPAAFKYFDTTIDRKRYTS | |
| | TKEVLDATLIHQSITGLYETRIDLSQLGGD | |

### D. Cas9 Nickase Variant

[0119] In one embodiment, the genome editing system described herein comprise a Cas9 nickase. The term “Cas9 nickase” of “nCas9” refers to a variant of Cas9 which is capable of introducing a single-strand break in a double strand DNA molecule target. In some embodiments, the Cas9 nickase comprises only a single functioning nuclease domain. The wild type Cas9 (e.g., the canonical SpCas9) comprises two separate nuclease domains, namely, the RuvC domain (which cleaves the non-protospacer DNA strand) and HNH domain (which cleaves the protospacer DNA strand). In one embodiment, the Cas9 nickase comprises a mutation in the RuvC domain which inactivates the RuvC nuclease activity. For example, mutations in aspartate (D) 10, histidine (H) 983, aspartate (D) 986, or glutamate (E) 762, have been reported as loss-of-function mutations of the RuvC nuclease domain and the creation of a functional Cas9 nickase (e.g., Nishimasu et al., “Crystal structure of Cas9 in complex with guide RNA and target DNA,” Cell 156(5), 935-949, which is incorporated herein by reference). Thus, nickase mutations in the RuvC domain could include D10X, H983X, D986X, or E762X, wherein X is any amino acid other than the wild type amino acid. In certain embodiments, the nickase could be D10A, of H983A, or D986A, or E762A, or a combination thereof. In various embodiments, the Cas9 nickase can having a mutation in the RuvC nuclease domain and have one of the following amino acid sequences, or a variant thereof having an amino acid sequence that has at least 80%, at least 85%, at least 90%, at least 95%, or at least 99% sequence identity thereto.

| Description | Sequence | SEQ ID NO: |
|---|---|---|
| Cas9 nickase | MDKKYSIGLXIGTNSVGWAVITDEYKVPSKKFKVLGNTD | SEQ ID NO: |
| Streptococcus | RHSIKKNLIGALLFDSGETAEATRLKRTARRRYTRRKNRI | 35 |
| pyogenes | CYLQEIFSNEMAKVDDSFFHRLEESFLVEEDKKHERHPIF | |
| Q99ZW2 | GNIVDEVAYHEKYPTIYHLRKKLVDSTDKADLRLIYLAL | |
| Cas9 with | AHMIKFRGHFLIEGDLNPDNSDVDKLFIQLVQTYNQLFEE | |
| D10X, | NPINASGVDAKAILSARLSKSRRLENLIAQLPGEKKNGLF | |
| wherein X is | GNLIALSLGLTPNFKSNFDLAEDAKLQLSKDTYDDDLDN | |
| any alternate | LLAQIGDQYADLFLAAKNLSDAILLSDILRVNTEITKAPLS | |
| amino acid | ASMIKRYDEHHQDLTLLKALVRQQLPEKYKEIFFDQSKN | |
| | GYAGYIDGGASQEEFYKFIKPILEKMDGTEELLVKLNRE | |
| | DLLRKQRTFDNGSIPHQIHLGELHAILRRQEDFYPFLKDN | |
| | REKIEKILTFRIPYYVGPLARGNSRFAWMTRKSEETITPW | |
| | NFEEVVDKGASAQSFIERMTNFDKNLPNEKVLPKHSLLY | |
| | EYFTVYNELTKVKYVTEGMRKPAFLSGEQKKAIVDLLFK | |
| | TNRKVTVKQLKEDYFKKIECFDSVEISGVEDRFNASLGT | |
| | YHDLLKIIKDKDFLDNEENEDILEDIVLTLTLFEDREMIEE | |
| | RLKTYAHLFDDKVMKQLKRRRYTGWGRLSRKLINGIRD | |
| | KQSGKTILDFLKSDGFANRNFMQLIHDDSLTFKEDIQKAQ | |
| | VSGQGDSLHEHIANLAGSPAIKKGILQTVKVVDELVKVM | |
| | GRHKPENIVIEMARENQTTQKGQKNSRERMKRIEEGIKE | |
| | LGSQILKEHPVENTQLQNEKLYLYYLQNGRDMYVDQEL | |
| | DINRLSDYDVDHIVPQSFLKDDSIDNKVLTRSDKNRGKS | |
| | DNVPSEEVVKKMKNYWRQLLNAKLITQRKFDNLTKAER | |
| | GGLSELDKAGFIKRQLVETRQITKHVAQILDSRMNTKYD | |
| | ENDKLIREVKVITLKSKLVSDFRKDFQFYKVREINTNYHH | |
| | AHDAYLNAVVGTALIKKYPKLESEFVYGDYKVYDVRK | |
| | MIAKSEQEIGKATAKYFFYSNIMNFFKTEITLANGEIRKRP | |
| | LIETNGETGEIVWDKGRDFATVRKVLSMPQVNIVKKTEV | |
| | QTGGFSKESILPKRNSDKLIARKKDWDPKKYGGFDSPTV | |
| | AYSVLVVAKVEKGKSKKLKSVKELLGITIMERSSFEKNPI | |
| | DFLEAKGYKEVKKDLIIKLPKYSLFELENGRKRMLASAG | |
| | ELQKGNELALPSKYVNFLYLASHYEKLKGSPEDNEQKQL | |
| | FVEQHKHYLDEIIEQISEFSKRVILADANLDKVLSAYNKH | |
| | RDKPIREQAENIIHLFTLTNLGAPAAFKYFDTTIDRKRYTS | |
| | TKEVLDATLIHQSITGLYETRIDLSQLGGD | |
| Cas9 nickase | MDKKYSIGLDIGTNSVGWAVITDEYKVPSKKFKVLGNTD | SEQ ID NO: |
| Streptococcus | RHSIKKNLIGALLFDSGETAEATRLKRTARRRYTRRKNRI | 36 |
| pyogenes | CYLQEIFSNEMAKVDDSFFHRLEESFLVEEDKKHERHPIF | |
| Q99ZW2 | GNIVDEVAYHEKYPTIYHLRKKLVDSTDKADLRLIYLAL | |
| Cas9 with | AHMIKFRGHFLIEGDLNPDNSDVDKLFIQLVQTYNQLFEE | |
| E762X, | NPINASGVDAKAILSARLSKSRRLENLIAQLPGEKKNGLF | |
| wherein X is | GNLIALSLGLTPNFKSNFDLAEDAKLQLSKDTYDDDLDN | |
| any alternate | LLAQIGDQYADLFLAAKNLSDAILLSDILRVNTEITKAPLS | |
| amino acid | ASMIKRYDEHHQDLTLLKALVRQQLPEKYKEIFFDQSKN | |
| | GYAGYIDGGASQEEFYKFIKPILEKMDGTEELLVKLNRE | |
| | DLLRKQRTFDNGSIPHQIHLGELHAILRRQEDFYPFLKDN | |
| | REKIEKILTFRIPYYVGPLARGNSRFAWMTRKSEETITPW | |
| | NFEEVVDKGASAQSFIERMTNFDKNLPNEKVLPKHSLLY | |
| | EYFTVYNELTKVKYVTEGMRKPAFLSGEQKKAIVDLLFK | |
| | TNRKVTVKQLKEDYFKKIECFDSVEISGVEDRFNASLGT | |
| | YHDLLKIIKDKDFLDNEENEDILEDIVLTLTLFEDREMIEE | |
| | RLKTYAHLFDDKVMKQLKRRRYTGWGRLSRKLINGIRD | |
| | KQSGKTILDFLKSDGFANRNFMQLIHDDSLTFKEDIQKAQ | |
| | VSGQGDSLHEHIANLAGSPAIKKGILQTVKVVDELVKVM | |
| | GRHKPENIVIXMARENQTTQKGQKNSRERMKRIEEGIKE | |
| | LGSQILKEHPVENTQLQNEKLYLYYLQNGRDMYVDQEL | |
| | DINRLSDYDVDHIVPQSFLKDDSIDNKVLTRSDKNRGKS | |
| | DNVPSEEVVKKMKNYWRQLLNAKLITQRKFDNLTKAER | |
| | GGLSELDKAGFIKRQLVETRQITKHVAQILDSRMNTKYD | |
| | ENDKLIREVKVITLKSKLVSDFRKDFQFYKVREINTNYHH | |
| | AHDAYLNAVVGTALIKKYPKLESEFVYGDYKVYDVRK | |
| | MIAKSEQEIGKATAKYFFYSNIMNFFKTEITLANGEIRKRP | |
| | LIETNGETGEIVWDKGRDFATVRKVLSMPQVNIVKKTEV | |
| | QTGGFSKESILPKRNSDKLIARKKDWDPKKYGGFDSPTV | |
| | AYSVLVVAKVEKGKSKKLKSVKELLGITIMERSSFEKNPI | |
| | DFLEAKGYKEVKKDLIIKLPKYSLFELENGRKRMLASAG | |
| | ELQKGNELALPSKYVNFLYLASHYEKLKGSPEDNEQKQL | |
| | FVEQHKHYLDEIIEQISEFSKRVILADANLDKVLSAYNKH | |
| | RDKPIREQAENIIHLFTLTNLGAPAAFKYFDTTIDRKRYTS | |
| | TKEVLDATLIHQSITGLYETRIDLSQLGGD | |
| Cas9 nickase | MDKKYSIGLDIGTNSVGWAVITDEYKVPSKKFKVLGNTD | SEQ ID NO: |
| Streptococcus | RHSIKKNLIGALLFDSGETAEATRLKRTARRRYTRRKNRI | 37 |
| pyogenes | CYLQEIFSNEMAKVDDSFFHRLEESFLVEEDKKHERHPIF | |
| Q99ZW2 | GNIVDEVAYHEKYPTIYHLRKKLVDSTDKADLRLIYLAL | |
| Cas9 with | AHMIKFRGHFLIEGDLNPDNSDVDKLFIQLVQTYNQLFEE | |
| H983X, | NPINASGVDAKAILSARLSKSRRLENLIAQLPGEKKNGLF | |
| wherein X is | GNLIALSLGLTPNFKSNFDLAEDAKLQLSKDTYDDDLDN | |
| any alternate | LLAQIGDQYADLFLAAKNLSDAILLSDILRVNTEITKAPLS | |
| amino acid | ASMIKRYDEHHQDLTLLKALVRQQLPEKYKEIFFDQSKN | |
| | GYAGYIDGGASQEEFYKFIKPILEKMDGTEELLVKLNRE | |
| | DLLRKQRTFDNGSIPHQIHLGELHAILRRQEDFYPFLKDN | |
| | REKIEKILTFRIPYYVGPLARGNSRFAWMTRKSEETITPW | |
| | NFEEVVDKGASAQSFIERMTNFDKNLPNEKVLPKHSLLY | |
| | EYFTVYNELTKVKYVTEGMRKPAFLSGEQKKAIVDLLFK | |
| | TNRKVTVKQLKEDYFKKIECFDSVETSGVEDRFNASLGT | |
| | YHDLLKIIKDKDFLDNEENEDILEDIVLTLTLFEDREMIEE | |
| | RLKTYAHLFDDKVMKQLKRRRYTGWGRLSRKLINGIRD | |
| | KQSGKTILDFLKSDGFANRNFMQLIHDDSLTFKEDIQKAQ | |
| | VSGQGDSLHEHIANLAGSPAIKKGILQTVKVVDELVKVM | |
| | GRHKPENIVIEMARENQTTQKGQKNSRERMKRIEEGIKE | |
| | LGSQILKEHPVENTQLQNEKLYLYYLQNGRDMYVDQEL | |
| | DINRLSDYDVDHIVPQSFLKDDSIDNKVLTRSDKNRGKS | |
| | DNVPSEEVVKKMKNYWRQLLNAKLITQRKFDNLTKAER | |
| | GGLSELDKAGFIKRQLVETRQITKHVAQILDSRMNTKYD | |
| | ENDKLIREVKVITLKSKLVSDFRKDFQFYKVREINNYHX | |
| | AHDAYLNAVVGTALIKKYPKLESEFVYGDYKVYDVRK | |
| | MIAKSEQEIGKATAKYFFYSNIMNFFKTEITLANGEIRKRP | |
| | LIETNGETGEIVWDKGRDFATVRKVLSMPQVNIVKKTEV | |
| | QTGGFSKESILPKRNSDKLIARKKDWDPKKYGGFDSPTV | |
| | AYSVLVVAKVEKGKSKKLKSVKELLGITIMERSSFEKNPI | |
| | DFLEAKGYKEVKKDLIIKLPKYSLFELENGRKRMLASAG | |
| | ELQKGNELALPSKYVNFLYLASHYEKLKGSPEDNEQKQL | |
| | FVEQHKHYLDEIIEQISEFSKRVILADANLDKVLSAYNKH | |
| | RDKPIREQAENIIHLFTLTNLGAPAAFKYFDTTIDRKRYTS | |
| | TKEVLDATLIHQSITGLYETRIDLSQLGGD | |
| Cas9 nickase | MDKKYSIGLDIGTNSVGWAVITDEYKVPSKKFKVLGNTD | SEQ ID NO: |
| Streptococcus | RHSIKKNLIGALLFDSGETAEATRLKRTARRRYTRRKNRI | 38 |
| pyogenes | CYLQEIFSNEMAKVDDSFFHRLEESFLVEEDKKHERHPIF | |
| Q99ZW2 | GNIVDEVAYHEKYPTIYHLRKKLVDSTDKADLRLIYLAL | |
| Cas9 with | AHMIKFRGHFLIEGDLNPDNSDVDKLFIQLVQTYNQLFEE | |
| D986X, | NPINASGVDAKAILSARLSKSRRLENLIAQLPGEKKNGLF | |
| wherein X is | GNLIALSLGLTPNFKSNFDLAEDAKLQLSKDTYDDDLDN | |
| any alternate | LLAQIGDQYADLFLAAKNLSDAILLSDILRVNTEITKAPLS | |
| amino acid | ASMIKRYDEHHQDLTLLKALVRQQLPEKYKEIFFDQSKN | |
| | GYAGYIDGGASQEEFYKFIKPILEKMDGTEELLVKLNRE | |
| | DLLRKQRTFDNGSIPHQIHLGELHAILRRQEDFYPFLKDN | |
| | REKIEKILTFRIPYYVGPLARGNSRFAWMTRKSEETITPW | |
| | NFEEVVDKGASAQSFIERMTNFDKNLPNEKVLPKHSLLY | |
| | EYFTVYNELTKVKYVTEGMRKPAFLSGEQKKAIVDLLFK | |
| | TNRKVTVKQLKEDYFKKIECFDSVEISGVEDRFNASLGT | |
| | YHDLLKIIKDKDFLDNEENEDILEDIVLTLTLFEDREMIEE | |
| | RLKTYAHLFDDKVMKQLKRRRYTGWGRLSRKLINGIRD | |
| | KQSGKTILDFLKSDGFANRNFMQLIHDDSLTFKEDIQKAQ | |
| | VSGQGDSLHEHIANLAGSPAIKKGILQTVKVVDELVKVM | |
| | GRHKPENIVIEMARENQTTQKGQKNSRERMKRIEEGIKE | |
| | LGSQILKEHPVENTQLQNEKLYLYYLQNGRDMYVDQEL | |
| | DINRLSDYDVDHIVPQSFLKDDSIDNKVLTRSDKNRGKS | |
| | DNVPSEEVVKKMKNYWRQLLNAKLITQRKFDNLTKAER | |
| | GGLSELDKAGFIKRQLVETRQITKHVAQILDSRMNTKYD | |
| | ENDKLIREVKVITLKSKLVSDFRKDFQFYKVREINTNYHH | |
| | AHXAYLNAVVGTALIKKYPKLESEFVYGDYKVYDVRK | |
| | MIAKSEQEIGKATAKYFFYSNIMNFFKTEITLANGEIRKRP | |
| | LIETNGETGEIVWDKGRDFATVRKVLSMPQVNIVKKTEV | |
| | QTGGFSKESILPKRNSDKLIARKKDWDPKKYGGFDSPTV | |
| | AYSVLVVAKVEKGKSKKLKSVKELLGITIMERSSFEKNPI | |
| | DFLEAKGYKEVKKDLIIKLPKYSLFELENGRKRMLASAG | |
| | ELQKGNELALPSKYVNFLYLASHYEKLKGSPEDNEQKQL | |
| | FVEQHKHYLDEIIEQISEFSKRVILADANLDKVLSAYNKH | |
| | RDKPIREQAENIIHLFTLTNLGAPAAFKYFDTTIDRKRYTS | |
| | TKEVLDATLIHQSITGLYETRIDLSQLGGD | |
| Cas9 nickase | MDKKYSIGLAIGTNSVGWAVITDEYKVPSKKFKVLGNTD | SEQ ID NO: |
| Streptococcus | RHSIKKNLIGALLFDSGETAEATRLKRTARRRYTRRKNRI | 39 |
| pyogenes | CYLQEIFSNEMAKVDDSFFHRLEESFLVEEDKKHERHPIF | |
| Q99ZW2 | GNIVDEVAYHEKYPTIYHLRKKLVDSTDKADLRLIYLAL | |
| Cas9 with | AHMIKFRGHFLIEGDLNPDNSDVDKLFIQLVQTYNQLFEE | |
| D10A | NPINASGVDAKAILSARLSKSRRLENLIAQLPGEKKNGLF | |
| | GNLIALSLGLTPNFKSNFDLAEDAKLQLSKDTYDDDLDN | |
| | LLAQIGDQYADLFLAAKNLSDAILLSDILRVNTEITKAPLS | |
| | ASMIKRYDEHHQDLTLLKALVRQQLPEKYKEIFFDQSKN | |
| | GYAGYIDGGASQEEFYKFIKPILEKMDGTEELLVKLNRE | |
| | DLLRKQRTFDNGSIPHQIHLGELHAILRRQEDFYPFLKDN | |
| | REKIEKILTFRIPYYVGPLARGNSRFAWMTRKSEETITPW | |
| | NFEEVVDKGASAQSFIERMTNFDKNLPNEKVLPKHSLLY | |
| | EYFTVYNELTKVKYVTEGMRKPAFLSGEQKKAIVDLLFK | |
| | TNRKVTVKQLKEDYFKKIECFDSVETSGVEDRFNASLGT | |
| | YHDLLKIIKDKDFLDNEENEDILEDIVLTLTLFEDREMIEE | |
| | RLKTYAHLFDDKVMKQLKRRRYTGWGRLSRKLINGIRD | |
| | KQSGKTILDFLKSDGFANRNFMQLIHDDSLTFKEDIQKAQ | |
| | VSGQGDSLHEHIANLAGSPAIKKGILQTVKVVDELVKVM | |
| | GRHKPENIVIEMARENQTTQKGQKNSRERMKRIEEGIKE | |
| | LGSQILKEHPVENTQLQNEKLYLYYLQNGRDMYVDQEL | |
| | DINRLSDYDVDHIVPQSFLKDDSIDNKVLTRSDKNRGKS | |
| | DNVPSEEVVKKMKNYWRQLLNAKLITQRKFDNLTKAER | |
| | GGLSELDKAGFIKRQLVETRQITKHVAQILDSRMNTKYD | |
| | ENDKLIREVKVITLKSKLVSDFRKDFQFYKVREINTNYHH | |
| | AHDAYLNAVVGTALIKKYPKLESEFVYGDYKVYDVRK | |
| | MIAKSEQEIGKATAKYFFYSNIMNFFKTEITLANGEIRKRP | |
| | LIETNGETGEIVWDKGRDFATVRKVLSMPQVNIVKKTEV | |
| | QTGGFSKESILPKRNSDKLIARKKDWDPKKYGGFDSPTV | |
| | AYSVLVVAKVEKGKSKKLKSVKELLGITIMERSSFEKNPI | |
| | DFLEAKGYKEVKKDLIIKLPKYSLFELENGRKRMLASAG | |
| | ELQKGNELALPSKYVNFLYLASHYEKLKGSPEDNEQKQL | |
| | FVEQHKHYLDEIIEQISEFSKRVILADANLDKVLSAYNKH | |
| | RDKPIREQAENIIHLFTLTNLGAPAAFKYFDTTIDRKRYTS | |
| | TKEVLDATLIHQSITGLYETRIDLSQLGGD | |
| Cas9 nickase | MDKKYSIGLDIGTNSVGWAVITDEYKVPSKKFKVLGNTD | SEQ ID NO: |
| Streptococcus | RHSIKKNLIGALLFDSGETAEATRLKRTARRRYTRRKNRI | 40 |
| pyogenes | CYLQEIFSNEMAKVDDSFFHRLEESFLVEEDKKHERHPIF | |
| Q99ZW2 | GNIVDEVAYHEKYPTIYHLRKKLVDSTDKADLRLIYLAL | |
| Cas9 with | AHMIKFRGHFLIEGDLNPDNSDVDKLFIQLVQTYNQLFEE | |
| E762A | NPINASGVDAKAILSARLSKSRRLENLIAQLPGEKKNGLF | |
| | GNLIALSLGLTPNFKSNFDLAEDAKLQLSKDTYDDDLDN | |
| | LLAQIGDQYADLFLAAKNLSDAILLSDILRVNTEITKAPLS | |
| | ASMIKRYDEHHQDLTLLKALVRQQLPEKYKEIFFDQSKN | |
| | GYAGYIDGGASQEEFYKFIKPILEKMDGTEELLVKLNRE | |
| | DLLRKQRTFDNGSIPHQIHLGELHAILRRQEDFYPFLKDN | |
| | REKIEKILTFRIPYYVGPLARGNSRFAWMTRKSEETITPW | |
| | NFEEVVDKGASAQSFIERMTNFDKNLPNEKVLPKHSLLY | |
| | EYFTVYNELTKVKYVTEGMRKPAFLSGEQKKAIVDLLFK | |
| | TNRKVTVKQLKEDYFKKIECFDSVETSGVEDRFNASLGT | |
| | YHDLLKIIKDKDFLDNEENEDILEDIVLTLTLFEDREMIEE | |
| | RLKTYAHLFDDKVMKQLKRRRYTGWGRLSRKLINGIRD | |
| | KQSGKTILDFLKSDGFANRNFMQLIHDDSLTFKEDIQKAQ | |
| | VSGQGDSLHEHIANLAGSPAIKKGILQTVKVVDELVKVM | |
| | GRHKPENIVIAMARENQTTQKGQKNSRERMKRIEEGIKE | |
| | LGSQILKEHPVENTQLQNEKLYLYYLQNGRDMYVDQEL | |
| | DINRLSDYDVDHIVPQSFLKDDSIDNKVLTRSDKNRGKS | |
| | DNVPSEEVVKKMKNYWRQLLNAKLITQRKFDNLTKAER | |
| | GGLSELDKAGFIKRQLVETRQITKHVAQILDSRMNTKYD | |
| | ENDKLIREVKVITLKSKLVSDFRKDFQFYKVREINTNYHH | |
| | AHDAYLNAVVGTALIKKYPKLESEFVYGDYKVYDVRK | |
| | MIAKSEQEIGKATAKYFFYSNIMNFFKTEITLANGEIRKRP | |
| | LIETNGETGEIVWDKGRDFATVRKVLSMPQVNIVKKTEV | |
| | QTGGFSKESILPKRNSDKLIARKKDWDPKKYGGFDSPTV | |
| | AYSVLVVAKVEKGKSKKLKSVKELLGITIMERSSFEKNPI | |
| | DFLEAKGYKEVKKDLIIKLPKYSLFELENGRKRMLASAG | |
| | ELQKGNELALPSKYVNFLYLASHYEKLKGSPEDNEQKQL | |
| | FVEQHKHYLDEIIEQISEFSKRVILADANLDKVLSAYNKH | |
| | RDKPIREQAENIIHLFTLTNLGAPAAFKYFDTTIDRKRYTS | |
| | TKEVLDATLIHQSITGLYETRIDLSQLGGD | |
| Cas9 nickase | MDKKYSIGLDIGTNSVGWAVITDEYKVPSKKFKVLGNTD | SEQ ID NO: |
| Streptococcus | RHSIKKNLIGALLFDSGETAEATRLKRTARRRYTRRKNRI | 41 |
| pyogenes | CYLQEIFSNEMAKVDDSFFHRLEESFLVEEDKKHERHPIF | |
| Q99ZW2 | GNIVDEVAYHEKYPTIYHLRKKLVDSTDKADLRLIYLAL | |
| Cas9 with | AHMIKFRGHFLIEGDLNPDNSDVDKLFIQLVQTYNQLFEE | |
| H983A | NPINASGVDAKAILSARLSKSRRLENLIAQLPGEKKNGLF | |
| | GNLIALSLGLTPNFKSNFDLAEDAKLQLSKDTYDDDLDN | |
| | LLAQIGDQYADLFLAAKNLSDAILLSDILRVNTEITKAPLS | |
| | ASMIKRYDEHHQDLTLLKALVRQQLPEKYKEIFFDQSKN | |
| | GYAGYIDGGASQEEFYKFIKPILEKMDGTEELLVKLNRE | |
| | DLLRKQRTFDNGSIPHQIHLGELHAILRRQEDFYPFLKDN | |
| | REKIEKILTFRIPYYVGPLARGNSRFAWMTRKSEETITPW | |
| | NFEEVVDKGASAQSFIERMTNFDKNLPNEKVLPKHSLLY | |
| | EYFTVYNELTKVKYVTEGMRKPAFLSGEQKKAIVDLLFK | |
| | TNRKVTVKQLKEDYFKKIECFDSVEISGVEDRFNASLGT | |
| | YHDLLKIIKDKDFLDNEENEDILEDIVLTLTLFEDREMIEE | |
| | RLKTYAHLFDDKVMKQLKRRRYTGWGRLSRKLINGIRD | |
| | KQSGKTILDFLKSDGFANRNFMQLIHDDSLTFKEDIQKAQ | |
| | VSGQGDSLHEHIANLAGSPAIKKGILQTVKVVDELVKVM | |
| | GRHKPENIVIEMARENQTTQKGQKNSRERMKRIEEGIKE | |
| | LGSQILKEHPVENTQLQNEKLYLYYLQNGRDMYVDQEL | |
| | DINRLSDYDVDHIVPQSFLKDDSIDNKVLTRSDKNRGKS | |
| | DNVPSEEVVKKMKNYWRQLLNAKLITQRKFDNLTKAER | |
| | GGLSELDKAGFIKRQLVETRQITKHVAQILDSRMNTKYD | |
| | ENDKLIREVKVITLKSKLVSDFRKDFQFYKVREINNYHA | |
| | AHDAYLNAVVGTALIKKYPKLESEFVYGDYKVYDVRK | |
| | MIAKSEQEIGKATAKYFFYSNIMNFFKTEITLANGEIRKRP | |
| | LIETNGETGEIVWDKGRDFATVRKVLSMPQVNIVKKTEV | |
| | QTGGFSKESILPKRNSDKLIARKKDWDPKKYGGFDSPTV | |
| | AYSVLVVAKVEKGKSKKLKSVKELLGITIMERSSFEKNPI | |
| | DFLEAKGYKEVKKDLIIKLPKYSLFELENGRKRMLASAG | |
| | ELQKGNELALPSKYVNFLYLASHYEKLKGSPEDNEQKQL | |
| | FVEQHKHYLDEIIEQISEFSKRVILADANLDKVLSAYNKH | |
| | RDKPIREQAENIIHLFTLTNLGAPAAFKYFDTTIDRKRYTS | |
| | TKEVLDATLIHQSITGLYETRIDLSQLGGD | |
| Cas9 nickase | MDKKYSIGLDIGTNSVGWAVITDEYKVPSKKFKVLGNTD | SEQ ID NO: |
| Streptococcus | RHSIKKNLIGALLFDSGETAEATRLKRTARRRYTRRKNRI | 42 |
| pyogenes | CYLQEIFSNEMAKVDDSFFHRLEESFLVEEDKKHERHPIF | |
| Q99ZW2 | GNIVDEVAYHEKYPTIYHLRKKLVDSTDKADLRLIYLAL | |
| Cas9 with | AHMIKFRGHFLIEGDLNPDNSDVDKLFIQLVQTYNQLFEE | |
| D986A | NPINASGVDAKAILSARLSKSRRLENLIAQLPGEKKNGLF | |
| | GNLIALSLGLTPNFKSNFDLAEDAKLQLSKDTYDDDLDN | |
| | LLAQIGDQYADLFLAAKNLSDAILLSDILRVNTEITKAPLS | |
| | ASMIKRYDEHHQDLTLLKALVRQQLPEKYKEIFFDQSKN | |
| | GYAGYIDGGASQEEFYKFIKPILEKMDGTEELLVKLNRE | |
| | DLLRKQRTFDNGSIPHQIHLGELHAILRRQEDFYPFLKDN | |
| | REKIEKILTFRIPYYVGPLARGNSRFAWMTRKSEETITPW | |
| | NFEEVVDKGASAQSFIERMTNFDKNLPNEKVLPKHSLLY | |
| | EYFTVYNELTKVKYVTEGMRKPAFLSGEQKKAIVDLLFK | |
| | TNRKVTVKQLKEDYFKKIECFDSVETSGVEDRFNASLGT | |
| | YHDLLKIIKDKDFLDNEENEDILEDIVLTLTLFEDREMIEE | |
| | RLKTYAHLFDDKVMKQLKRRRYTGWGRLSRKLINGIRD | |
| | KQSGKTILDFLKSDGFANRNFMQLIHDDSLTFKEDIQKAQ | |
| | VSGQGDSLHEHIANLAGSPAIKKGILQTVKVVDELVKVM | |
| | GRHKPENIVIEMARENQTTQKGQKNSRERMKRIEEGIKE | |
| | LGSQILKEHPVENTQLQNEKLYLYYLQNGRDMYVDQEL | |
| | DINRLSDYDVDHIVPQSFLKDDSIDNKVLTRSDKNRGKS | |
| | DNVPSEEVVKKMKNYWRQLLNAKLITQRKFDNLTKAER | |
| | GGLSELDKAGFIKRQLVETRQITKHVAQILDSRMNTKYD | |
| | ENDKLIREVKVITLKSKLVSDFRKDFQFYKVREINTNYHH | |
| | AHAAYLNAVVGTALIKKYPKLESEFVYGDYKVYDVRK | |
| | MIAKSEQEIGKATAKYFFYSNIMNFFKTEITLANGEIRKRP | |
| | LIETNGETGEIVWDKGRDFATVRKVLSMPQVNIVKKTEV | |
| | QTGGFSKESILPKRNSDKLIARKKDWDPKKYGGFDSPTV | |
| | AYSVLVVAKVEKGKSKKLKSVKELLGITIMERSSFEKNPI | |
| | DFLEAKGYKEVKKDLIIKLPKYSLFELENGRKRMLASAG | |
| | ELQKGNELALPSKYVNFLYLASHYEKLKGSPEDNEQKQL | |
| | FVEQHKHYLDEIIEQISEFSKRVILADANLDKVLSAYNKH | |
| | RDKPIREQAENIIHLFTLTNLGAPAAFKYFDTTIDRKRYTS | |
| | TKEVLDATLIHQSITGLYETRIDLSQLGGD | |

[0120] In another embodiment, the as nickase comprises a mutation in the HNH domain which inactivates the HNH nuclease activity. For example, mutations in histidine (H) 840 or asparagine (R) 863 have been reported as loss-of-function mutations of the HNH nuclease domain and the creation of a functional Cas9 nickase (e.g., Nishimasu et al., “Crystal structure of Cas9 in complex with guide RNA and target DNA,” Cell 156(5), 935-949, which is incorporated herein by reference). Thus, nickase mutations in the HNH domain could include H840X and R863X, wherein X is any amino acid other than the wild type amino acid. In certain embodiments, the nickase could be H840A or R863A or a combination thereof.

[0121] In various embodiments, the Cas9 nickase can have a mutation in the HNH nuclease domain and have one of the following amino acid sequences, or a variant thereof having an amino acid sequence that has at least 80%, at least 85%, at least 90%, at least 95%, or at least 99% sequence identity thereto.

| Description | Sequence | SEQ ID NO: |
|---|---|---|
| Cas9 nickase | MDKKYSIGLDIGTNSVGWAVITDEYKVPSKKFKVLGNTD | SEQ ID NO: |
| Streptococcus | RHSIKKNLIGALLFDSGETAEATRLKRTARRRYTRRKNRI | 43 |
| pyogenes | CYLQEIFSNEMAKVDDSFFHRLEESFLVEEDKKHERHPIF | |
| Q99ZW2 | GNIVDEVAYHEKYPTIYHLRKKLVDSTDKADLRLIYLAL | |
| Cas9 with | AHMIKFRGHFLIEGDLNPDNSDVDKLFIQLVQTYNQLFEE | |
| H840X, | NPINASGVDAKAILSARLSKSRRLENLIAQLPGEKKNGLF | |
| wherein X is | GNLIALSLGLTPNFKSNFDLAEDAKLQLSKDTYDDDLDN | |
| any alternate | LLAQIGDQYADLFLAAKNLSDAILLSDILRVNTEITKAPLS | |
| amino acid | ASMIKRYDEHHQDLTLLKALVRQQLPEKYKEIFFDQSKN | |
| | GYAGYIDGGASQEEFYKFIKPILEKMDGTEELLVKLNRE | |
| | DLLRKQRTFDNGSIPHQIHLGELHAILRRQEDFYPFLKDN | |
| | REKIEKILTFRIPYYVGPLARGNSRFAWMTRKSEETITPW | |
| | NFEEVVDKGASAQSFIERMTNFDKNLPNEKVLPKHSLLY | |
| | EYFTVYNELTKVKYVTEGMRKPAFLSGEQKKAIVDLLFK | |
| | TNRKVTVKQLKEDYFKKIECFDSVEISGVEDRFNASLGT | |
| | YHDLLKIIKDKDFLDNEENEDILEDIVLTLTLFEDREMIEE | |
| | RLKTYAHLFDDKVMKQLKRRRYTGWGRLSRKLINGIRD | |
| | KQSGKTILDFLKSDGFANRNFMQLIHDDSLTFKEDIQKAQ | |
| | VSGQGDSLHEHIANLAGSPAIKKGILQTVKVVDELVKVM | |
| | GRHKPENIVIEMARENQTTQKGQKNSRERMKRIEEGIKE | |
| | LGSQILKEHPVENTQLQNEKLYLYYLQNGRDMYVDQEL | |
| | DINRLSDYDVDXIVPQSFLKDDSIDNKVLTRSDKNRGKS | |
| | DNVPSEEVVKKMKNYWRQLLNAKLITQRKFDNLTKAER | |
| | GGLSELDKAGFIKRQLVETRQITKHVAQILDSRMNTKYD | |
| | ENDKLIREVKVITLKSKLVSDFRKDFQFYKVREINTNYHH | |
| | AHDAYLNAVVGTALIKKYPKLESEFVYGDYKVYDVRK | |
| | MIAKSEQEIGKATAKYFFYSNIMNFFKTEITLANGEIRKRP | |
| | LIETNGETGEIVWDKGRDFATVRKVLSMPQVNIVKKTEV | |
| | QTGGFSKESILPKRNSDKLIARKKDWDPKKYGGFDSPTV | |
| | AYSVLVVAKVEKGKSKKLKSVKELLGITIMERSSFEKNPI | |
| | DFLEAKGYKEVKKDLIIKLPKYSLFELENGRKRMLASAG | |
| | ELQKGNELALPSKYVNFLYLASHYEKLKGSPEDNEQKQL | |
| | FVEQHKHYLDEIIEQISEFSKRVILADANLDKVLSAYNKH | |
| | RDKPIREQAENIIHLFTLTNLGAPAAFKYFDTTIDRKRYTS | |
| | TKEVLDATLIHQSITGLYETRIDLSQLGGD | |
| Cas9 nickase | MDKKYSIGLDIGTNSVGWAVITDEYKVPSKKFKVLGNTD | SEQ ID NO: |
| Streptococcus | RHSIKKNLIGALLFDSGETAEATRLKRTARRRYTRRKNRI | 44 |
| pyogenes | CYLQEIFSNEMAKVDDSFFHRLEESFLVEEDKKHERHPIF | |
| Q99ZW2 | GNIVDEVAYHEKYPTIYHLRKKLVDSTDKADLRLIYLAL | |
| Cas9 with | AHMIKFRGHFLIEGDLNPDNSDVDKLFIQLVQTYNQLFEE | |
| H840A | NPINASGVDAKAILSARLSKSRRLENLIAQLPGEKKNGLF | |
| | GNLIALSLGLTPNFKSNFDLAEDAKLQLSKDTYDDDLDN | |
| | LLAQIGDQYADLFLAAKNLSDAILLSDILRVNTEITKAPLS | |
| | ASMIKRYDEHHQDLTLLKALVRQQLPEKYKEIFFDQSKN | |
| | GYAGYIDGGASQEEFYKFIKPILEKMDGTEELLVKLNRE | |
| | DLLRKQRTFDNGSIPHQIHLGELHAILRRQEDFYPFLKDN | |
| | REKIEKILTFRIPYYVGPLARGNSRFAWMTRKSEETITPW | |
| | NFEEVVDKGASAQSFIERMTNFDKNLPNEKVLPKHSLLY | |
| | EYFTVYNELTKVKYVTEGMRKPAFLSGEQKKAIVDLLFK | |
| | TNRKVTVKQLKEDYFKKIECFDSVEISGVEDRFNASLGT | |
| | YHDLLKIIKDKDFLDNEENEDILEDIVLTLTLFEDREMIEE | |
| | RLKTYAHLFDDKVMKQLKRRRYTGWGRLSRKLINGIRD | |
| | KQSGKTILDFLKSDGFANRNFMQLIHDDSLTFKEDIQKAQ | |
| | VSGQGDSLHEHIANLAGSPAIKKGILQTVKVVDELVKVM | |
| | GRHKPENIVIEMARENQTTQKGQKNSRERMKRIEEGIKE | |
| | LGSQILKEHPVENTQLQNEKLYLYYLQNGRDMYVDQEL | |
| | DINRLSDYDVDAIVPQSFLKDDSIDNKVLTRSDKNRGKS | |
| | DNVPSEEVVKKMKNYWRQLLNAKLITQRKFDNLTKAER | |
| | GGLSELDKAGFIKRQLVETRQITKHVAQILDSRMNTKYD | |
| | ENDKLIREVKVITLKSKLVSDFRKDFQFYKVREINTNYHH | |
| | AHDAYLNAVVGTALIKKYPKLESEFVYGDYKVYDVRK | |
| | MIAKSEQEIGKATAKYFFYSNIMNFFKTEITLANGEIRKRP | |
| | LIETNGETGEIVWDKGRDFATVRKVLSMPQVNIVKKTEV | |
| | QTGGFSKESILPKRNSDKLIARKKDWDPKKYGGFDSPTV | |
| | AYSVLVVAKVEKGKSKKLKSVKELLGITIMERSSFEKNPI | |
| | DFLEAKGYKEVKKDLIIKLPKYSLFELENGRKRMLASAG | |
| | ELQKGNELALPSKYVNFLYLASHYEKLKGSPEDNEQKQL | |
| | FVEQHKHYLDEIIEQISEFSKRVILADANLDKVLSAYNKH | |
| | RDKPIREQAENIIHLFTLTNLGAPAAFKYFDTTIDRKRYTS | |
| | TKEVLDATLIHQSITGLYETRIDLSQLGGD | |
| Cas9 nickase | MDKKYSIGLDIGTNSVGWAVITDEYKVPSKKFKVLGNTD | SEQ ID NO: |
| Streptococcus | RHSIKKNLIGALLFDSGETAEATRLKRTARRRYTRRKNRI | 45 |
| pyogenes | CYLQEIFSNEMAKVDDSFFHRLEESFLVEEDKKHERHPIF | |
| Q99ZW2 | GNIVDEVAYHEKYPTIYHLRKKLVDSTDKADLRLIYLAL | |
| Cas9 with | AHMIKFRGHFLIEGDLNPDNSDVDKLFIQLVQTYNQLFEE | |
| R863X, | NPINASGVDAKAILSARLSKSRRLENLIAQLPGEKKNGLF | |
| wherein X is | GNLIALSLGLTPNFKSNFDLAEDAKLQLSKDTYDDDLDN | |
| any alternate | LLAQIGDQYADLFLAAKNLSDAILLSDILRVNTEITKAPLS | |
| amino acid | ASMIKRYDEHHQDLTLLKALVRQQLPEKYKEIFFDQSKN | |
| | GYAGYIDGGASQEEFYKFIKPILEKMDGTEELLVKLNRE | |
| | DLLRKQRTFDNGSIPHQIHLGELHAILRRQEDFYPFLKDN | |
| | REKIEKILTFRIPYYVGPLARGNSRFAWMTRKSEETITPW | |
| | NFEEVVDKGASAQSFIERMTNFDKNLPNEKVLPKHSLLY | |
| | EYFTVYNELTKVKYVTEGMRKPAFLSGEQKKAIVDLLFK | |
| | TNRKVTVKQLKEDYFKKIECFDSVETSGVEDRFNASLGT | |
| | YHDLLKIIKDKDFLDNEENEDILEDIVLTLTLFEDREMIEE | |
| | RLKTYAHLFDDKVMKQLKRRRYTGWGRLSRKLINGIRD | |
| | KQSGKTILDFLKSDGFANRNFMQLIHDDSLTFKEDIQKAQ | |
| | VSGQGDSLHEHIANLAGSPAIKKGILQTVKVVDELVKVM | |
| | GRHKPENIVIEMARENQTTQKGQKNSRERMKRIEEGIKE | |
| | LGSQILKEHPVENTQLQNEKLYLYYLQNGRDMYVDQEL | |
| | DINRLSDYDVDHIVPQSFLKDDSIDNKVLTRSDKNXGKS | |
| | DNVPSEEVVKKMKNYWRQLLNAKLITQRKFDNLTKAER | |
| | GGLSELDKAGFIKRQLVETRQITKHVAQILDSRMNTKYD | |
| | ENDKLIREVKVITLKSKLVSDFRKDFQFYKVREINTNYHH | |
| | AHDAYLNAVVGTALIKKYPKLESEFVYGDYKVYDVRK | |
| | MIAKSEQEIGKATAKYFFYSNIMNFFKTEITLANGEIRKRP | |
| | LIETNGETGEIVWDKGRDFATVRKVLSMPQVNIVKKTEV | |
| | QTGGFSKESILPKRNSDKLIARKKDWDPKKYGGFDSPTV | |
| | AYSVLVVAKVEKGKSKKLKSVKELLGITIMERSSFEKNPI | |
| | DFLEAKGYKEVKKDLIIKLPKYSLFELENGRKRMLASAG | |
| | ELQKGNELALPSKYVNFLYLASHYEKLKGSPEDNEQKQL | |
| | FVEQHKHYLDEIIEQISEFSKRVILADANLDKVLSAYNKH | |
| | RDKPIREQAENIIHLFTLTNLGAPAAFKYFDTTIDRKRYTS | |
| | TKEVLDATLIHQSITGLYETRIDLSQLGGD | |
| Cas9 nickase | MDKKYSIGLDIGTNSVGWAVITDEYKVPSKKFKVLGNTD | SEQ ID NO: |
| Streptococcus | RHSIKKNLIGALLFDSGETAEATRLKRTARRRYTRRKNRI | 46 |
| pyogenes | CYLQEIFSNEMAKVDDSFFHRLEESFLVEEDKKHERHPIF | |
| Q99ZW2 | GNIVDEVAYHEKYPTIYHLRKKLVDSTDKADLRLIYLAL | |
| Cas9 with | AHMIKFRGHFLIEGDLNPDNSDVDKLFIQLVQTYNQLFEE | |
| R863A | NPINASGVDAKAILSARLSKSRRLENLIAQLPGEKKNGLF | |
| | GNLIALSLGLTPNFKSNFDLAEDAKLQLSKDTYDDDLDN | |
| | LLAQIGDQYADLFLAAKNLSDAILLSDILRVNTEITKAPLS | |
| | ASMIKRYDEHHQDLTLLKALVRQQLPEKYKEIFFDQSKN | |
| | GYAGYIDGGASQEEFYKFIKPILEKMDGTEELLVKLNRE | |
| | DLLRKQRTFDNGSIPHQIHLGELHAILRRQEDFYPFLKDN | |
| | REKIEKILTFRIPYYVGPLARGNSRFAWMTRKSEETITPW | |
| | NFEEVVDKGASAQSFIERMTNFDKNLPNEKVLPKHSLLY | |
| | EYFTVYNELTKVKYVTEGMRKPAFLSGEQKKAIVDLLFK | |
| | TNRKVTVKQLKEDYFKKIECFDSVETSGVEDRFNASLGT | |
| | YHDLLKIIKDKDFLDNEENEDILEDIVLTLTLFEDREMIEE | |
| | RLKTYAHLFDDKVMKQLKRRRYTGWGRLSRKLINGIRD | |
| | KQSGKTILDFLKSDGFANRNFMQLIHDDSLTFKEDIQKAQ | |
| | VSGQGDSLHEHIANLAGSPAIKKGILQTVKVVDELVKVM | |
| | GRHKPENIVIEMARENQTTQKGQKNSRERMKRIEEGIKE | |
| | LGSQILKEHPVENTQLQNEKLYLYYLQNGRDMYVDQEL | |
| | DINRLSDYDVDHIVPQSFLKDDSIDNKVLTRSDKNAGKS | |
| | DNVPSEEVVKKMKNYWRQLLNAKLITQRKFDNLTKAER | |
| | GGLSELDKAGFIKRQLVETRQITKHVAQILDSRMNTKYD | |
| | ENDKLIREVKVITLKSKLVSDFRKDFQFYKVREINTNYHH | |
| | AHDAYLNAVVGTALIKKYPKLESEFVYGDYKVYDVRK | |
| | MIAKSEQEIGKATAKYFFYSNIMNFFKTEITLANGEIRKRP | |
| | LIETNGETGEIVWDKGRDFATVRKVLSMPQVNIVKKTEV | |
| | QTGGFSKESILPKRNSDKLIARKKDWDPKKYGGFDSPTV | |
| | AYSVLVVAKVEKGKSKKLKSVKELLGITIMERSSFEKNPI | |
| | DFLEAKGYKEVKKDLIIKLPKYSLFELENGRKRMLASAG | |
| | ELQKGNELALPSKYVNFLYLASHYEKLKGSPEDNEQKQL | |
| | FVEQHKHYLDEIIEQISEFSKRVILADANLDKVLSAYNKH | |
| | RDKPIREQAENIIHLFTLTNLGAPAAFKYFDTTIDRKRYTS | |
| | TKEVLDATLIHQSITGLYETRIDLSQLGGD | |

[0122] In some embodiments, the N-terminal methionine is removed from a Cas9 nickase, or from any Cas9 variant, ortholog, or equivalent disclosed or contemplated herein. For example, methionine-minus Cas9 nickases include the following sequences, or a variant thereof having an amino acid sequence that has at least 80%, at least 85%, at least 90%, at least 95%, or at least 99% sequence identity thereto.

| Description | Sequence |
|---|---|
| Cas9 nickase | DKKYSIGLDIGTNSVGWAVITDEYKVPSKKFKVLGNTDRHSIKKNLIG |
| (Met minus) | ALLFDSGETAEATRLKRTARRRYTRRKNRICYLQEIFSNEMAKVDDSF |
| Streptococcus | FHRLEESFLVEEDKKHERHPIFGNIVDEVAYHEKYPTIYHLRKKLVDST |
| pyogenes | DKADLRLIYLALAHMIKFRGHFLIEGDLNPDNSDVDKLFIQLVQTYNQ |
| Q99ZW2 | LFEENPINASGVDAKAILSARLSKSRRLENLIAQLPGEKKNGLFGNLIAL |
| Cas9 with | SLGLTPNFKSNFDLAEDAKLQLSKDTYDDDLDNLLAQIGDQYADLFLA |
| H840X, | AKNLSDAILLSDILRVNTEITKAPLSASMIKRYDEHHQDLTLLKALVRQ |
| wherein X is | QLPEKYKEIFFDQSKNGYAGYIDGGASQEEFYKFIKPILEKMDGTEELL |
| any alternate | VKLNREDLLRKQRTFDNGSIPHQIHLGELHAILRRQEDFYPFLKDNREK |
| amino acid | IEKILTFRIPYYVGPLARGNSRFAWMTRKSEETITPWNFEEVVDKGASA |
| | QSFIERMTNFDKNLPNEKVLPKHSLLYEYFTVYNELTKVKYVTEGMR |
| | KPAFLSGEQKKAIVDLLFKTNRKVTVKQLKEDYFKKIECFDSVETSGVE |
| | DRFNASLGTYHDLLKIIKDKDFLDNEENEDILEDIVLTLTLFEDREMIEE |
| | RLKTYAHLFDDKVMKQLKRRRYTGWGRLSRKLINGIRDKQSGKTILD |
| | FLKSDGFANRNFMQLIHDDSLTFKEDIQKAQVSGQGDSLHEHIANLAG |
| | SPAIKKGILQTVKVVDELVKVMGRHKPENIVIEMARENQTTQKGQKNS |
| | RERMKRIEEGIKELGSQILKEHPVENTQLQNEKLYLYYLQNGRDMYV |
| | DQELDINRLSDYDVDXIVPQSFLKDDSIDNKVLTRSDKNRGKSDNVPS |
| | EEVVKKMKNYWRQLLNAKLITQRKFDNLTKAERGGLSELDKAGFIKR |
| | QLVETRQITKHVAQILDSRMNTKYDENDKLIREVKVITLKSKLVSDFR |
| | KDFQFYKVREINNYHHAHDAYLNAVVGTALIKKYPKLESEFVYGDYK |
| | VYDVRKMIAKSEQEIGKATAKYFFYSNIMNFFKTEITLANGEIRKRPLIE |
| | TNGETGEIVWDKGRDFATVRKVLSMPQVNIVKKTEVQTGGFSKESILP |
| | KRNSDKLIARKKDWDPKKYGGFDSPTVAYSVLVVAKVEKGKSKKLK |
| | SVKELLGITIMERSSFEKNPIDFLEAKGYKEVKKDLIIKLPKYSLFELEN |
| | GRKRMLASAGELQKGNELALPSKYVNFLYLASHYEKLKGSPEDNEQK |
| | QLFVEQHKHYLDEIIEQISEFSKRVILADANLDKVLSAYNKHRDKPIRE |
| | QAENIIHLFTLTNLGAPAAFKYFDTTIDRKRYTSTKEVLDATLIHQSITG |
| | LYETRIDLSQLGGD (SEQ ID NO: 47) |
| Cas9 nickase | DKKYSIGLDIGTNSVGWAVITDEYKVPSKKFKVLGNTDRHSIKKNLIG |
| (Met minus) | ALLFDSGETAEATRLKRTARRRYTRRKNRICYLQEIFSNEMAKVDDSF |
| Streptococcus | FHRLEESFLVEEDKKHERHPIFGNIVDEVAYHEKYPTIYHLRKKLVDST |
| pyogenes | DKADLRLIYLALAHMIKFRGHFLIEGDLNPDNSDVDKLFIQLVQTYNQ |
| Q99ZW2 | LFEENPINASGVDAKAILSARLSKSRRLENLIAQLPGEKKNGLFGNLIAL |
| Cas9 with | SLGLTPNFKSNFDLAEDAKLQLSKDTYDDDLDNLLAQIGDQYADLFLA |
| H840A | AKNLSDAILLSDILRVNTEITKAPLSASMIKRYDEHHQDLTLLKALVRQ |
| | QLPEKYKEIFFDQSKNGYAGYIDGGASQEEFYKFIKPILEKMDGTEELL |
| | VKLNREDLLRKQRTFDNGSIPHQIHLGELHAILRRQEDFYPFLKDNREK |
| | IEKILTFRIPYYVGPLARGNSRFAWMTRKSEETITPWNFEEVVDKGASA |
| | QSFIERMTNFDKNLPNEKVLPKHSLLYEYFTVYNELTKVKYVTEGMR |
| | KPAFLSGEQKKAIVDLLFKTNRKVTVKQLKEDYFKKIECFDSVETSGVE |
| | DRFNASLGTYHDLLKIIKDKDFLDNEENEDILEDIVLTLTLFEDREMIEE |
| | RLKTYAHLFDDKVMKQLKRRRYTGWGRLSRKLINGIRDKQSGKTILD |
| | FLKSDGFANRNFMQLIHDDSLTFKEDIQKAQVSGQGDSLHEHIANLAG |
| | SPAIKKGILQTVKVVDELVKVMGRHKPENIVIEMARENQTTQKGQKNS |
| | RERMKRIEEGIKELGSQILKEHPVENTQLQNEKLYLYYLQNGRDMYV |
| | DQELDINRLSDYDVDAIVPQSFLKDDSIDNKVLTRSDKNRGKSDNVPS |
| | EEVVKKMKNYWRQLLNAKLITQRKFDNLTKAERGGLSELDKAGFIKR |
| | QLVETRQITKHVAQILDSRMNTKYDENDKLIREVKVITLKSKLVSDFR |
| | KDFQFYKVREINNYHHAHDAYLNAVVGTALIKKYPKLESEFVYGDYK |
| | VYDVRKMIAKSEQEIGKATAKYFFYSNIMNFFKTEITLANGEIRKRPLIE |
| | TNGETGEIVWDKGRDFATVRKVLSMPQVNIVKKTEVQTGGFSKESILP |
| | KRNSDKLIARKKDWDPKKYGGFDSPTVAYSVLVVAKVEKGKSKKLK |
| | SVKELLGITIMERSSFEKNPIDFLEAKGYKEVKKDLIIKLPKYSLFELEN |
| | GRKRMLASAGELQKGNELALPSKYVNFLYLASHYEKLKGSPEDNEQK |
| | QLFVEQHKHYLDEIIEQISEFSKRVILADANLDKVLSAYNKHRDKPIRE |
| | QAENIIHLFTLTNLGAPAAFKYFDTTIDRKRYTSTKEVLDATLIHQSITG |
| | LYETRIDLSQLGGD (SEQ ID NO: 48) |
| Cas9 nickase | DKKYSIGLDIGTNSVGWAVITDEYKVPSKKFKVLGNTDRHSIKKNLIG |
| (Met minus) | ALLFDSGETAEATRLKRTARRRYTRRKNRICYLQEIFSNEMAKVDDSF |
| Streptococcus | FHRLEESFLVEEDKKHERHPIFGNIVDEVAYHEKYPTIYHLRKKLVDST |
| pyogenes | DKADLRLIYLALAHMIKFRGHFLIEGDLNPDNSDVDKLFIQLVQTYNQ |
| Q99ZW2 | LFEENPINASGVDAKAILSARLSKSRRLENLIAQLPGEKKNGLFGNLIAL |
| Cas9 with | SLGLTPNFKSNFDLAEDAKLQLSKDTYDDDLDNLLAQIGDQYADLFLA |
| R863X, | AKNLSDAILLSDILRVNTEITKAPLSASMIKRYDEHHQDLTLLKALVRQ |
| wherein X is | QLPEKYKEIFFDQSKNGYAGYIDGGASQEEFYKFIKPILEKMDGTEELL |
| any alternate | VKLNREDLLRKQRTFDNGSIPHQIHLGELHAILRRQEDFYPFLKDNREK |
| amino acid | IEKILTFRIPYYVGPLARGNSRFAWMTRKSEETITPWNFEEVVDKGASA |
| | QSFIERMTNFDKNLPNEKVLPKHSLLYEYFTVYNELTKVKYVTEGMR |
| | KPAFLSGEQKKAIVDLLFKTNRKVTVKQLKEDYFKKIECFDSVETSGVE |
| | DRFNASLGTYHDLLKIIKDKDFLDNEENEDILEDIVLTLTLFEDREMIEE |
| | RLKTYAHLFDDKVMKQLKRRRYTGWGRLSRKLINGIRDKQSGKTILD |
| | FLKSDGFANRNFMQLIHDDSLTFKEDIQKAQVSGQGDSLHEHIANLAG |
| | SPAIKKGILQTVKVVDELVKVMGRHKPENIVIEMARENQTTQKGQKNS |
| | RERMKRIEEGIKELGSQILKEHPVENTQLQNEKLYLYYLQNGRDMYV |
| | DQELDINRLSDYDVDHIVPQSFLKDDSIDNKVLTRSDKNXGKSDNVPS |
| | EEVVKKMKNYWRQLLNAKLITQRKFDNLTKAERGGLSELDKAGFIKR |
| | QLVETRQITKHVAQILDSRMNTKYDENDKLIREVKVITLKSKLVSDFR |
| | KDFQFYKVREINNYHHAHDAYLNAVVGTALIKKYPKLESEFVYGDYK |
| | VYDVRKMIAKSEQEIGKATAKYFFYSNIMNFFKTEITLANGEIRKRPLIE |
| | TNGETGEIVWDKGRDFATVRKVLSMPQVNIVKKTEVQTGGFSKESILP |
| | KRNSDKLIARKKDWDPKKYGGFDSPTVAYSVLVVAKVEKGKSKKLK |
| | SVKELLGITIMERSSFEKNPIDFLEAKGYKEVKKDLIIKLPKYSLFELEN |
| | GRKRMLASAGELQKGNELALPSKYVNFLYLASHYEKLKGSPEDNEQK |
| | QLFVEQHKHYLDEIIEQISEFSKRVILADANLDKVLSAYNKHRDKPIRE |
| | QAENIIHLFTLTNLGAPAAFKYFDTTIDRKRYTSTKEVLDATLIHQSITG |
| | LYETRIDLSQLGGD (SEQ ID NO: 49) |
| Cas9 nickase | DKKYSIGLDIGTNSVGWAVITDEYKVPSKKFKVLGNTDRHSIKKNLIG |
| (Met minus) | ALLFDSGETAEATRLKRTARRRYTRRKNRICYLQEIFSNEMAKVDDSF |
| Streptococcus | FHRLEESFLVEEDKKHERHPIFGNIVDEVAYHEKYPTIYHLRKKLVDST |
| pyogenes | DKADLRLIYLALAHMIKFRGHFLIEGDLNPDNSDVDKLFIQLVQTYNQ |
| Q99ZW2 | LFEENPINASGVDAKAILSARLSKSRRLENLIAQLPGEKKNGLFGNLIAL |
| Cas9 with | SLGLTPNFKSNFDLAEDAKLQLSKDTYDDDLDNLLAQIGDQYADLFLA |
| R863A | AKNLSDAILLSDILRVNTEITKAPLSASMIKRYDEHHQDLTLLKALVRQ |
| | QLPEKYKEIFFDQSKNGYAGYIDGGASQEEFYKFIKPILEKMDGTEELL |
| | VKLNREDLLRKQRTFDNGSIPHQIHLGELHAILRRQEDFYPFLKDNREK |
| | IEKILTFRIPYYVGPLARGNSRFAWMTRKSEETITPWNFEEVVDKGASA |
| | QSFIERMTNFDKNLPNEKVLPKHSLLYEYFTVYNELTKVKYVTEGMR |
| | KPAFLSGEQKKAIVDLLFKTNRKVTVKQLKEDYFKKIECFDSVETSGVE |
| | DRFNASLGTYHDLLKIIKDKDFLDNEENEDILEDIVLTLTLFEDREMIEE |
| | RLKTYAHLFDDKVMKQLKRRRYTGWGRLSRKLINGIRDKQSGKTILD |
| | FLKSDGFANRNFMQLIHDDSLTFKEDIQKAQVSGQGDSLHEHIANLAG |
| | SPAIKKGILQTVKVVDELVKVMGRHKPENIVIEMARENQTTQKGQKNS |
| | RERMKRIEEGIKELGSQILKEHPVENTQLQNEKLYLYYLQNGRDMYV |
| | DQELDINRLSDYDVDHIVPQSFLKDDSIDNKVLTRSDKNAGKSDNVPS |
| | EEVVKKMKNYWRQLLNAKLITQRKFDNLTKAERGGLSELDKAGFIKR |
| | QLVETRQITKHVAQILDSRMNTKYDENDKLIREVKVITLKSKLVSDFR |
| | KDFQFYKVREINNYHHAHDAYLNAVVGTALIKKYPKLESEFVYGDYK |
| | VYDVRKMIAKSEQEIGKATAKYFFYSNIMNFFKTEITLANGEIRKRPLIE |
| | TNGETGEIVWDKGRDFATVRKVLSMPQVNIVKKTEVQTGGFSKESILP |
| | KRNSDKLIARKKDWDPKKYGGFDSPTVAYSVLVVAKVEKGKSKKLK |
| | SVKELLGITIMERSSFEKNPIDFLEAKGYKEVKKDLIIKLPKYSLFELEN |
| | GRKRMLASAGELQKGNELALPSKYVNFLYLASHYEKLKGSPEDNEQK |
| | QLFVEQHKHYLDEIIEQISEFSKRVILADANLDKVLSAYNKHRDKPIRE |
| | QAENIIHLFTLTNLGAPAAFKYFDTTIDRKRYTSTKEVLDATLIHQSITG |
| | LYETRIDLSQLGGD (SEQ ID NO: 50) |

### E. Other Cas9 Variants

[0123] Besides dead Cas9 and Cas9 nickase variants, the Cas9 proteins used herein may also include other “Cas9 variants” having at least about 70% identical, at least about 80% identical, at least about 90% identical, at least about 95% identical, at least about 96% identical, at least about 97% identical, at least about 98% identical, at least about 99% identical, at least about 99.5% identical, or at least about 99.9% identical to any reference Cas9 protein, including any wild type Cas9, or mutant Cas9 (e.g., a dead Cas9 or Cas9 nickase), or fragment Cas9, or circular permutant Cas9, or other variant of Cas9 disclosed herein or known in the art. In some embodiments, a Cas9 variant may have 1, 2, 3, 4, 5, 6, 7, 8, 9, 10, 11, 12, 13, 14, 15, 16, 17, 18, 19, 20, 21, 22, 21, 24, 25, 26, 27, 28, 29, 30, 31, 32, 33, 34, 35, 36, 37, 38, 39, 40, 41, 42, 43, 44, 45, 46, 47, 48, 49, 50 or more amino acid changes compared to a reference Cas9. In some embodiments, the Cas9 variant comprises a fragment of a reference Cas9 (e.g., a gRNA binding domain or a DNA-cleavage domain), such that the fragment is at least about 70% identical, at least about 80% identical, at least about 90% identical, at least about 95% identical, at least about 96% identical, at least about 97% identical, at least about 98% identical, at least about 99% identical, at least about 99.5% identical, or at least about 99.9% identical to the corresponding fragment of wild type Cas9. In some embodiments, the fragment is at least 30%, at least 35%, at least 40%, at least 45%, at least 50%, at least 55%, at least 60%, at least 65%, at least 70%, at least 75%, at least 80%, at least 85%, at least 90%, at least 95% identical, at least 96%, at least 97%, at least 98%, at least 99%, or at least 99.5% of the amino acid length of a corresponding wild type Cas9 (e.g., SEQ ID NO: 11).

[0124] In some embodiments, the disclosure also may utilize Cas9 fragments which retain their functionality and which are fragments of any herein disclosed Cas9 protein. In some embodiments, the Cas9 fragment is at least 100 amino acids in length. In some embodiments, the fragment is at least 100, 150, 200, 250, 300, 350, 400, 450, 500, 550, 600, 650, 700, 750, 800, 850, 900, 950, 1000, 1050, 1100, 1150, 1200, 1250, or at least 1300 amino acids in length.

[0125] In various embodiments, the genome editing system disclosed herein may comprise one of the Cas9 variants described as follows, or a Cas9 variant thereof having at least about 70% identical, at least about 80% identical, at least about 90% identical, at least about 95% identical, at least about 96% identical, at least about 97% identical, at least about 98% identical, at least about 99% identical, at least about 99.5% identical, or at least about 99.9% identical to any reference Cas9 variants.

### F. Small-Sized Cas9 Variants

[0126] In some embodiments, the genome editing system contemplated herein can include a Cas9 protein that is of smaller molecular weight than the canonical SpCas9 sequence. In some embodiments, the smaller-sized Cas9 variants may facilitate delivery to cells, e.g., by an expression vector, nanoparticle, or other means of delivery. In certain embodiments, the smaller-sized Cas9 variants can include enzymes categorized as type II enzymes of the Class 2 CRISPR-Cas systems. In some embodiments, the smaller-sized Cas9 variants can include enzymes categorized as type V enzymes of the Class 2 CRISPR-Cas systems. In other embodiments, the smaller-sized Cas9 variants can include enzymes categorized as type VI enzymes of the Class 2 CRISPR-Cas systems.

[0127] The canonical SpCas9 protein is 1368 amino acids in length and has a predicted molecular weight of 158 kilodaltons. The term “small-sized Cas9 variant”, as used herein, refers to any Cas9 variant—naturally occurring, engineered, or otherwise—that is less than at least 1300 amino acids, or at least less than 1290 amino acids, or than less than 1280 amino acids, or less than 1270 amino acid, or less than 1260 amino acid, or less than 1250 amino acids, or less than 1240 amino acids, or less than 1230 amino acids, or less than 1220 amino acids, or less than 1210 amino acids, or less than 1200 amino acids, or less than 1190 amino acids, or less than 1180 amino acids, or less than 1170 amino acids, or less than 1160 amino acids, or less than 1150 amino acids, or less than 1140 amino acids, or less than 1130 amino acids, or less than 1120 amino acids, or less than 1110 amino acids, or less than 1100 amino acids, or less than 1050 amino acids, or less than 1000 amino acids, or less than 950 amino acids, or less than 900 amino acids, or less than 850 amino acids, or less than 800 amino acids, or less than 750 amino acids, or less than 700 amino acids, or less than 650 amino acids, or less than 600 amino acids, or less than 550 amino acids, or less than 500 amino acids, but at least larger than about 400 amino acids and retaining the required functions of the Cas9 protein. The Cas9 variants can include those categorized as type II, type V, or type VI enzymes of the Class 2 CRISPR-Cas system.

[0128] In various embodiments, the genome editing system disclosed herein may comprise one of the small-sized Cas9 variants described as follows, or a Cas9 variant thereof having at least about 70% identical, at least about 80% identical, at least about 90% identical, at least about 95% identical, at least about 96% identical, at least about 97% identical, at least about 98% identical, at least about 99% identical, at least about 99.5% identical, or at least about 99.9% identical to any reference small-sized Cas9 protein.

| Description | Sequence | SEQ ID NO: |
|---|---|---|
| SaCas9 | MGKRNYILGLDIGITSVGYGIIDYETRDVIDAGVRLFKEA | SEQ ID NO: |
| Staphylococcus | NVENNEGRRSKRGARRLKRRRRHRIQRVKKLLFDYNLL | 51 |
| aureus | TDHSELSGINPYEARVKGLSQKLSEEEFSAALLHLAKRRG | |
| 1053 AA | VHNVNEVEEDTGNELSTKEQISRNSKALEEKYVAELQLE | |
| 123 kDa | RLKKDGEVRGSINRFKTSDYVKEAKQLLKVQKAYHQLD | |
| | QSFIDTYIDLLETRRTYYEGPGEGSPFGWKDIKEWYEML | |
| | MGHCTYFPEELRSVKYAYNADLYNALNDLNNLVITRDE | |
| | NEKLEYYEKFQIIENVFKQKKKPTLKQIAKEILVNEEDIK | |
| | GYRVTSTGKPEFTNLKVYHDIKDITARKEIIENAELLDQIA | |
| | KILTIYQSSEDIQEELTNLNSELTQEEIEQISNLKGYTGTHN | |
| | LSLKAINLILDELWHTNDNQIAIFNRLKLVPKKVDLSQQK | |
| | EIPTTLVDDFILSPVVKRSFIQSIKVINAIIKKYGLPNDIIIEL | |
| | AREKNSKDAQKMINEMQKRNRQTNERIEEIIRTTGKENA | |
| | KYLIEKIKLHDMQEGKCLYSLEAIPLEDLLNNPFNYEVDH | |
| | IIPRSVSFDNSFNNKVLVKQEENSKKGNRTPFQYLSSSDS | |
| | KISYETFKKHILNLAKGKGRISKTKKEYLLEERDINRFSV | |
| | QKDFINRNLVDTRYATRGLMNLLRSYFRVNNLDVKVKSI | |
| | NGGFTSFLRRKWKFKKERNKGYKHHAEDALIIANADFIF | |
| | KEWKKLDKAKKVMENQMFEEKQAESMPEIETEQEYKEI | |
| | FITPHQIKHIKDFKDYKYSHRVDKKPNRKLINDTLYSTRK | |
| | DDKGNTLIVNNLNGLYDKDNDKLKKLINKSPEKLLMYH | |
| | HDPQTYQKLKLIMEQYGDEKNPLYKYYEETGNYLTKYS | |
| | KKDNGPVIKKIKYYGNKLNAHLDITDDYPNSRNKVVKLS | |
| | LKPYRFDVYLDNGVYKFVTVKNLDVIKKENYYEVNSKC | |
| | YEEAKKLKKISNQAEFIASFYKNDLIKINGELYRVIGVNN | |
| | DLLNRIEVNMIDITYREYLENMNDKRPPHIIKTIASKTQSI | |
| | KKYSTDILGNLYEVKSKKHPQIIKK | |
| NmeCas9 | MAAFKPNSINYILGLDIGIASVGWAMVEIDEEENPIRLIDL | SEQ ID NO: |
| N. | GVRVFERAEVPKTGDSLAMARRLARSVRRLTRRRAHRL | 52 |
| meningitidis | LRTRRLLKREGVLQAANFDENGLIKSLPNTPWQLRAAAL | |
| 1083 AA | DRKLTPLEWSAVLLHLIKHRGYLSQRKNEGETADKELGA | |
| 124.5 kDa | LLKGVAGNAHALQTGDFRTPAELALNKFEKESGHIRNQR | |
| | SDYSHTFSRKDLQAELILLFEKQKEFGNPHVSGGLKEGIE | |
| | TLLMTQRPALSGDAVQKMLGHCTFEPAEPKAAKNTYTA | |
| | ERFIWLTKLNNLRILEQGSERPLTDTERATLMDEPYRKSK | |
| | LTYAQARKLLGLEDTAFFKGLRYGKDNAEASTLMEMKA | |
| | YHAISRALEKEGLKDKKSPLNLSPELQDEIGTAFSLFKTD | |
| | EDITGRLKDRIQPEILEALLKHISFDKFVQISLKALRRIVPL | |
| | MEQGKRYDEACAEIYGDHYGKKNTEEKIYLPPIPADEIR | |
| | NPVVLRALSQARKVINGVVRRYGSPARIHIETAREVGKSF | |
| | KDRKEIEKRQEENRKDREKAAAKFREYFPNFVGEPKSKD | |
| | ILKLRLYEQQHGKCLYSGKEINLGRLNEKGYVEIDAALPF | |
| | SRTWDDSFNNKVLVLGSENQNKGNQTPYEYFNGKDNSR | |
| | EWQEFKARVETSRFPRSKKQRILLQKFDEDGFKERNLND | |
| | TRYVNRFLCQFVADRMRLTGKGKKRVFASNGQITNLLR | |
| | GFWGLRKVRAENDRHHALDAVVVACSTVAMQQKITRF | |
| | VRYKEMNAFDGKTIDKETGEVLHQKTHFPQPWEFFAQE | |
| | VMIRVFGKPDGKPEFEEADTLEKLRTLLAEKLSSRPEAVH | |
| | EYVTPLFVSRAPNRKMSGQGHMETVKSAKRLDEGVSVL | |
| | RVPLTQLKLKDLEKMVNREREPKLYEALKARLEAHKDD | |
| | PAKAFAEPFYKYDKAGNRTQQVKAVRVEQVQKTGVWV | |
| | RNHNGIADNATMVRVDVFEKGDKYYLVPIYSWQVAKGI | |
| | LPDRAVVQGKDEEDWQLIDDSFNFKFSLHPNDLVEVITK | |
| | KARMFGYFASCHRGTGNINIRIHDLDHKIGKNGILEGIGV | |
| | KTALSFQKYQIDELGKEIRPCRLKKRPPVR | |
| CjCas9 | MARILAFDIGISSIGWAFSENDELKDCGVRIFTKVENPKT | SEQ ID NO: |
| C. jejuni | GESLALPRRLARSARKRLARRKARLNHLKHLIANEFKLN | 53 |
| 984 AA | YEDYQSFDESLAKAYKGSLISPYELRFRALNELLSKQDFA | |
| 114.9 kDa | RVILHIAKRRGYDDIKNSDDKEKGAILKAIKQNEEKLAN | |
| | YQSVGEYLYKEYFQKFKENSKEFTNVRNKKESYERCIAQ | |
| | SFLKDELKLIFKKQREFGFSFSKKFEEEVLSVAFYKRALK | |
| | DFSHLVGNCSFFTDEKRAPKNSPLAFMFVALTRIINLLNN | |
| | LKNTEGILYTKDDLNALLNEVLKNGTLTYKQTKKLLGLS | |
| | DDYEFKGEKGTYFIEFKKYKEFIKALGEHNLSQDDLNEIA | |
| | KDITLIKDEIKLKKALAKYDLNQNQIDSLSKLEFKDHLNIS | |
| | FKALKLVTPLMLEGKKYDEACNELNLKVAINEDKKDFLP | |
| | AFNETYYKDEVTNPVVLRAIKEYRKVLNALLKKYGKVH | |
| | KINIELAREVGKNHSQRAKIEKEQNENYKAKKDAELECE | |
| | KLGLKINSKNILKLRLFKEQKEFCAYSGEKIKISDLQDEK | |
| | MLEIDHIYPYSRSFDDSYMNKVLVFTKQNQEKLNQTPFE | |
| | AFGNDSAKWQKIEVLAKNLPTKKQKRILDKNYKDKEQK | |
| | NFKDRNLNDTRYIARLVLNYTKDYLDFLPLSDDENTKLN | |
| | DTQKGSKVHVEAKSGMLTSALRHTWGFSAKDRNNHLH | |
| | HAIDAVIIAYANNSIVKAFSDFKKEQESNSAELYAKKISEL | |
| | DYKNKRKFFEPFSGFRQKVLDKIDEIFVSKPERKKPSGAL | |
| | HEETFRKEEEFYQSYGGKEGVLKALELGKIRKVNGKIVK | |
| | NGDMFRVDIFKHKKTNKFYAVPIYTMDFALKVLPNKAV | |
| | ARSKKGEIKDWILMDENYEFCFSLYKDSLILIQTKDMQEP | |
| | EFVYYNAFTSSTVSLIVSKHDNKFETLSKNQKILFKNANE | |
| | KEVIAKSIGIQNLKVFEKYIVSALGEVTKAEFRQREDFKK | |
| GeoCas9 | MRYKIGLDIGITSVGWAVMNLDIPRIEDLGVRIFDRAENP | SEQ ID NO: |
| G. stearo- | QTGESLALPRRLARSARRRLRRRKHRLERIRRLVIREGILT | 54 |
| thermophilus | KEELDKLFEEKHEIDVWQLRVEALDRKLNNDELARVLL | |
| 1087 AA | HLAKRRGFKSNRKSERSNKENSTMLKHIEENRAILSSYRT | |
| 127 kDa | VGEMIVKDPKFALHKRNKGENYTNTIARDDLEREIRLIFS | |
| | KQREFGNMSCTEEFENEYITIWASQRPVASKDDIEKKVGF | |
| | CTFEPKEKRAPKATYTFQSFIAWEHINKLRLISPSGARGLT | |
| | DEERRLLYEQAFQKNKITYHDIRTLLHLPDDTYFKGIVYD | |
| | RGESRKQNENIRFLELDAYHQIRKAVDKVYGKGKSSSFL | |
| | PIDFDTFGYALTLFKDDADIHSYLRNEYEQNGKRMPNLA | |
| | NKVYDNELIEELLNLSFTKFGHLSLKALRSILPYMEQGEV | |
| | YSSACERAGYTFTGPKKKQKTMLLPNIPPIANPVVMRAL | |
| | TQARKVVNAIIKKYGSPVSIHIELARDLSQTFDERRKTKK | |
| | EQDENRKKNETAIRQLMEYGLTLNPTGHDIVKFKLWSEQ | |
| | NGRCAYSLQPIEIERLLEPGYVEVDHVIPYSRSLDDSYTN | |
| | KVLVLTRENREKGNRIPAEYLGVGTERWQQFETFVLTNK | |
| | QFSKKKRDRLLRLHYDENEETEFKNRNLNDTRYISRFFA | |
| | NFIREHLKFAESDDKQKVYTVNGRVTAHLRSRWEFNKN | |
| | REESDLHHAVDAVIVACTTPSDIAKVTAFYQRREQNKEL | |
| | AKKTEPHFPQPWPHFADELRARLSKHPKESIKALNLGNY | |
| | DDQKLESLQPVFVSRMPKRSVTGAAHQETLRRYVGIDER | |
| | SGKIQTVVKTKLSEIKLDASGHFPMYGKESDPRTYEAIRQ | |
| | RLLEHNNDPKKAFQEPLYKPKKNGEPGPVIRTVKIIDTKN | |
| | QVIPLNDGKTVAYNSNIVRVDVFEKDGKYYCVPVYTMD | |
| | IMKGILPNKAIEPNKPYSEWKEMTEDYTFRFSLYPNDLIRI | |
| | ELPREKTVKTAAGEEINVKDVFVYYKTIDSANGGLELISH | |
| | DHRFSLRGVGSRTLKRFEKYQVDVLGNIYKVRGEKRVG | |
| | LASSAHSKPGKTIRPLQSTRD | |
| LbaCas12a | MSKLEKFTNCYSLSKTLRFKAIPVGKTQENIDNKRLLVED | SEQ ID NO: |
| L. bacterium | EKRAEDYKGVKKLLDRYYLSFINDVLHSIKLKNLNNYIS | 55 |
| 1228 AA | LFRKKTRTEKENKELENLEINLRKEIAKAFKGNEGYKSLF | |
| 143.9 kDa | KKDIIETILPEFLDDKDEIALVNSFNGFTTAFTGFFDNREN | |
| | MFSEEAKSTSIAFRCINENLTRYISNMDIFEKVDAIFDKHE | |
| | VQEIKEKILNSDYDVEDFFEGEFFNFVLTQEGIDVYNAIIG | |
| | GFVTESGEKIKGLNEYINLYNQKTKQKLPKFKPLYKQVL | |
| | SDRESLSFYGEGYTSDEEVLEVFRNTLNKNSEIFSSIKKLE | |
| | KLFKNFDEYSSAGIFVKNGPAISTISKDIFGEWNVIRDKW | |
| | NAEYDDIHLKKKAVVTEKYEDDRRKSFKKIGSFSLEQLQ | |
| | EYADADLSVVEKLKEIIIQKVDEIYKVYGSSEKLFDADFV | |
| | LEKSLKKNDAVVAIMKDLLDSVKSFENYIKAFFGEGKET | |
| | NRDESFYGDFVLAYDILLKVDHIYDAIRNYVTQKPYSKD | |
| | KFKLYFQNPQFMGGWDKDKETDYRATILRYGSKYYLAI | |
| | MDKKYAKCLQKIDKDDVNGNYEKINYKLLPGPNKMLPK | |
| | VFFSKKWMAYYNPSEDIQKIYKNGTFKKGDMFNLNDCH | |
| | KLIDFFKDSISRYPKWSNAYDFNFSETEKYKDIAGFYREV | |
| | EEQGYKVSFESASKKEVDKLVEEGKLYMFQIYNKDFSDK | |
| | SHGTPNLHTMYFKLLFDENNHGQIRLSGGAELFMRRASL | |
| | KKEELVVHPANSPIANKNPDNPKKTTTLSYDVYKDKRFS | |
| | EDQYELHIPIAINKCPKNIFKINTEVRVLLKHDDNPYVIGI | |
| | DRGERNLLYIVVVDGKGNIVEQYSLNEIINNFNGIRIKTD | |
| | YHSLLDKKEKERFEARQNWTSIENIKELKAGYISQVVHKI | |
| | CELVEKYDAVIALEDLNSGFKNSRVKVEKQVYQKFEKM | |
| | LIDKLNYMVDKKSNPCATGGALKGYQITNKFESFKSMST | |
| | QNGFIFYIPAWLTSKIDPSTGFVNLLKTKYTSIADSKKFISS | |
| | FDRIMYVPEEDLFEFALDYKNFSRTDADYIKKWKLYSYG | |
| | NRIRIFRNPKKNNVFDWEEVCLTSAYKELFNKYGINYQQ | |
| | GDIRALLCEQSDKAFYSSFMALMSLMLQMRNSITGRTDV | |
| | DFLISPVKNSDGIFYDSRNYEAQENAILPKNADANGAYNI | |
| | ARKVLWAIGQFKKAEDEKLDKVKIAISNKEWLEYAQTS | |
| | VKH | |
| BhCas12b | MATRSFILKIEPNEEVKKGLWKTHEVLNHGIAYYMNILK | SEQ ID NO: |
| B. hisashii | LIRQEAIYEHHEQDPKNPKKVSKAEIQAELWDFVLKMQK | 56 |
| 1108 AA | CNSFTHEVDKDEVFNILRELYEELVPSSVEKKGEANQLSN | |
| 130.4 kDa | KFLYPLVDPNSQSGKGTASSGRKPRWYNLKIAGDPSWEE | |
| | EKKKWEEDKKKDPLAKILGKLAEYGLIPLFIPYTDSNEPI | |
| | VKEIKWMEKSRNQSVRRLDKDMFIQALERFLSWESWNL | |
| | KVKEEYEKVEKEYKTLEERIKEDIQALKALEQYEKERQE | |
| | QLLRDTLNTNEYRLSKRGLRGWREIIQKWLKMDENEPSE | |
| | KYLEVFKDYQRKHPREAGDYSVYEFLSKKENHFIWRNH | |
| | PEYPYLYATFCEIDKKKKDAKQQATFTLADPINHPLWVR | |
| | FEERSGSNLNKYRILTEQLHTEKLKKKLTVQLDRLIYPTE | |
| | SGGWEEKGKVDIVLLPSRQFYNQIFLDIEEKGKHAFTYK | |
| | DESIKFPLKGTLGGARVQFDRDHLRRYPHKVESGNVGRI | |
| | YFNMTVNIEPTESPVSKSLKIHRDDFPKVVNFKPKELTEW | |
| | IKDSKGKKLKSGIESLEIGLRVMSIDLGQRQAAAASIFEV | |
| | VDQKPDIEGKLFFPIKGTELYAVHRASFNIKLPGETLVKS | |
| | REVLRKAREDNLKLMNQKLNFLRNVLHFQQFEDITEREK | |
| | RVTKWISRQENSDVPLVYQDELIQIRELMYKPYKDWVAF | |
| | LKQLHKRLEVEIGKEVKHWRKSLSDGRKGLYGISLKNID | |
| | EIDRTRKFLLRWSLRPTEPGEVRRLEPGQRFAIDQLNHLN | |
| | ALKEDRLKKMANTIIMHALGYCYDVRKKKWQAKNPAC | |
| | QIILFEDLSNYNPYEERSRFENSKLMKWSRREIPRQVALQ | |
| | GEIYGLQVGEVGAQFSSRFHAKTGSPGIRCSVVTKEKLQ | |
| | DNRFFKNLQREGRLTLDKIAVLKEGDLYPDKGGEKFISLS | |
| | KDRKCVTTHADINAAQNLQKRFWTRTHGFYKVYCKAY | |
| | QVDGQTVYIPESKDQKQKIIEEFGEGYFILKDGVYEWVN | |
| | AGKLKIKKGSSKQSSSELVDSDILKDSFDLASELKGEKLM | |
| | LYRDPSGNVFPSDKWMAAGVFFGKLERILISKLTNQYSIS | |
| | TIEDDSSKQSM | |

### G. Cas9 Equivalents

[0129] In some embodiments, the genome editing system described herein can include any Cas9 equivalent. As used herein, the term “Cas9 equivalent” is a broad term that encompasses any napDNAbp protein that serves the same function as Cas9 in the present genome editing system despite that its amino acid primary sequence and/or its three-dimensional structure may be different and/or unrelated from an evolutionary standpoint. Thus, while Cas9 equivalents include any Cas9 ortholog, homolog, mutant, or variant described or embraced herein that are evolutionarily related, the Cas9 equivalents also embrace proteins that may have evolved through convergent evolution processes to have the same or similar function as Cas9, but which do not necessarily have any similarity with regard to amino acid sequence and/or three dimensional structure. The genome editing system described here embrace any Cas9 equivalent that would provide the same or similar function as Cas9 despite that the Cas9 equivalent may be based on a protein that arose through convergent evolution. For instance, if Cas9 refers to a type II enzyme of the CRISPR-Cas system, a Cas9 equivalent can refer to a type V or type VI enzyme of the CRISPR-Cas system.

[0130] For example, Cas12e (CasX) is a Cas9 equivalent that reportedly has the same function as Cas9 but which evolved through convergent evolution. Thus, the Cas12e (CasX) protein described in Liu et al., “CasX enzymes comprises a distinct family of RNA-guided genome editors,” Nature, 2019, Vol. 566: 218-223, is contemplated to be used with the genome editing system described herein. In addition, any variant or modification of Cas12e (CasX) is conceivable and within the scope of the present disclosure.

[0131] Cas9 is a bacterial enzyme that evolved in a wide variety of species. However, the Cas9 equivalents contemplated herein may also be obtained from archaea, which constitute a domain and kingdom of single-celled prokaryotic microbes different from bacteria.

[0132] In some embodiments, Cas9 equivalents may refer to Cas12e (CasX) or Cas12d (CasY), which have been described in, for example, Burstein et al., “New CRISPR-Cas systems from uncultivated microbes.” Cell Res. 2017 Feb. 21. doi: 10.1038/cr.2017.21, the entire contents of which is hereby incorporated by reference. Using genome-resolved metagenomics, a number of CRISPR-Cas systems were identified, including the first reported Cas9 in the archaeal domain of life. This divergent Cas9 protein was found in little-studied nanoarchaea as part of an active CRISPR-Cas system. In bacteria, two previously unknown systems were discovered, CRISPR-Cas12e and CRISPR-Cas12d, which are among the most compact systems yet discovered. In some embodiments, Cas9 refers to Cas12e, or a variant of Cas12e. In some embodiments, Cas9 refers to a Cas12d, or a variant of Cas12d. It should be appreciated that other RNA-guided DNA binding proteins may be used as a nucleic acid programmable DNA binding protein (napDNAbp), and are within the scope of this disclosure. Also see Liu et al., “CasX enzymes comprises a distinct family of RNA-guided genome editors,” Nature, 2019, Vol. 566: 218-223. Any of these Cas9 equivalents are contemplated.

[0133] In some embodiments, the Cas9 equivalent comprises an amino acid sequence that is at least 85%, at least 90%, at least 91%, at least 92%, at least 93%, at least 94%, at least 95%, at least 96%, at least 97%, at least 98%, at least 99%, or at least 99.5% identical to a naturally-occurring Cas12e (CasX) or Cas12d (CasY) protein. In some embodiments, the napDNAbp is a naturally-occurring Cas12e (CasX) or Cas12d (CasY) protein. In some embodiments, the napDNAbp comprises an amino acid sequence that is at least 85%, at least 90%, at least 91%, at least 92%, at least 93%, at least 94%, at least 95%, at least 96%, at least 97%, at least 98%, at least 99%, or at least 99.5% identical to a wild-type Cas moiety or any Cas moiety provided herein.

[0134] In various embodiments, the nucleic acid programmable DNA binding proteins include, without limitation, Cas9 (e.g., dCas9 and nCas9), Cas12e (CasX), Cas12d (CasY), Cas12a (Cpf1), Cas12b1 (C2c1), Cas13a (C2c2), Cas12c (C2c3), Argonaute, and Cas12b1. One example of a nucleic acid programmable DNA-binding protein that has different PAM specificity than Cas9 is Clustered Regularly Interspaced Short Palindromic Repeats from Prevotella and Francisella 1 (i.e., Cas12a (Cpf1)). Similar to Cas9, Cas12a (Cpf1) is also a Class 2 CRISPR effector, but it is a member of type V subgroup of enzymes, rather than the type II subgroup. It has been shown that Cas12a (Cpf1) mediates robust DNA interference with features distinct from Cas9. Cas12a (Cpf1) is a single RNA-guided endonuclease lacking tracrRNA, and it utilizes a T-rich protospacer-adjacent motif (TTN, TTTN, or YTN). Moreover, Cpf1 cleaves DNA via a staggered DNA double-stranded break. Out of 16 Cpf1-family proteins, two enzymes from Acidaminococcus and Lachnospiraceae are shown to have efficient genome-editing activity in human cells. Cpf1 proteins are known in the art and have been described previously, for example Yamano et al., “Crystal structure of Cpf1 in complex with guide RNA and target DNA.” Cell (165) 2016, p. 949-962; the entire contents of which is hereby incorporated by reference.

[0135] In still other embodiments, the Cas protein may include any CRISPR associated protein, including but not limited to, Cas12a, Cas12b1, Cas1, Cas1B, Cas2, Cas3, Cas4, Cas5, Cas6, Cas7, Cas8, Cas9 (also known as Csn1 and Csx12), Cas10, Csy1, Csy2, Csy3, Cse1, Cse2, Csc1, Csc2, Csa5, Csn2, Csm2, Csm3, Csm4, Csm5, Csm6, Cmr1, Cmr3, Cmr4, Cmr5, Cmr6, Csb1, Csb2, Csb3, Csx17, Csx14, Csx10, Csx16, CsaX, Csx3, Csx1, Csx15, Csf1, Csf2, Csf3, Csf4, homologs thereof, or modified versions thereof, and preferably comprising a nickase mutation (e.g., a mutation corresponding to the D10A mutation of the wild type Cas9 polypeptide of SEQ ID NO: 11).

[0136] In various other embodiments, the napDNAbp can be any of the following proteins: a Cas9, a Cas12a (Cpf1), a Cas12e (CasX), a Cas12d (CasY), a Cas12b1 (C2c1), a Cas13a (C2c2), a Cas12c (C2c3), a GeoCas9, a CjCas9, a Cas12g, a Cas12h, a Cas12i, a Cas13b, a Cas13c, a Cas13d, a Cas14, a Csn2, an xCas9, an SpCas9-NG, a circularly permuted Cas9, or an Argonaute (Ago) domain, or a variant thereof.

[0137] Exemplary Cas9 equivalent protein sequences can include the following:

| Description | Sequence |
|---|---|
| AsCas12a | MTQFEGFTNLYQVSKTLRFELIPQGKTLKHIQEQGFIEEDKARNDHYKEL |
| (previously | KPIIDRIYKTYADQCLQLVQLDWENLSAAIDSYRKEKTEETRNALIEEQA |
| known as | TYRNAIHDYFIGRTDNLTDAINKRHAEIYKGLFKAELFNGKVLKQLGTV |
| Cpf1) | TTTEHENALLRSFDKFTTYFSGFYENRKNVFSAEDISTAIPHRIVQDNFPK |
| Acidaminococcus | FKENCHIFTRLITAVPSLREHFENVKKAIGIFVSTSIEEVFSFPFYNQLLTQ |
| sp. (strain | TQIDLYNQLLGGISREAGTEKIKGLNEVLNLAIQKNDETAHIIASLPHRFIP |
| BV3L6) | LFKQILSDRNTLSFILEEFKSDEEVIQSFCKYKTLLRNENVLETAEALFNE |
| UniProtKB | LNSIDLTHIFISHKKLETISSALCDHWDTLRNALYERRISELTGKITKSAKE |
| U2UMQ6 | KVQRSLKHEDINLQEIISAAGKELSEAFKQKTSEILSHAHAALDQPLPTTL |
| | KKQEEKEILKSQLDSLLGLYHLLDWFAVDESNEVDPEFSARLTGIKLEM |
| | EPSLSFYNKARNYATKKPYSVEKFKLNFQMPTLASGWDVNKEKNNGAI |
| | LFVKNGLYYLGIMPKQKGRYKALSFEPTEKTSEGFDKMYYDYFPDAAK |
| | MIPKCSTQLKAVTAHFQTHTTPILLSNNFIEPLEITKEIYDLNNPEKEPKKF |
| | QTAYAKKTGDQKGYREALCKWIDFTRDFLSKYTKTTSIDLSSLRPSSQY |
| | KDLGEYYAELNPLLYHISFQRIAEKEIMDAVETGKLYLFQIYNKDFAKG |
| | HHGKPNLHTLYWTGLFSPENLAKTSIKLNGQAELFYRPKSRMKRMAHR |
| | LGEKMLNKKLKDQKTPIPDTLYQELYDYVNHRLSHDLSDEARALLPNVI |
| | TKEVSHEIIKDRRFTSDKFFFHVPITLNYQAANSPSKFNQRVNAYLKEHP |
| | ETPIIGIDRGERNLIYITVIDSTGKILEQRSLNTIQQFDYQKKLDNREKERV |
| | AARQAWSVVGTIKDLKQGYLSQVIHEIVDLMIHYQAVVVLENLNFGFK |
| | SKRTGIAEKAVYQQFEKMLIDKLNCLVLKDYPAEKVGGVLNPYQLTDQ |
| | FTSFAKMGTQSGFLFYVPAPYTSKIDPLTGFVDPFVWKTIKNHESRKHFL |
| | EGFDFLHYDVKTGDFILHFKMNRNLSFQRGLPGFMPAWDIVFEKNETQF |
| | DAKGTPFIAGKRIVPVIENHRFTGRYRDLYPANELIALLEEKGIVFRDGSN |
| | ILPKLLENDDSHAIDTMVAHRSVLQMRNSNAATGEDYINSPVRDLNGV |
| | CFDSRFQNPEWPMDADANGAYHIALKGQLLLNHLKESKDLKLQNGISN |
| | QDWLAYIQELRN (SEQ ID NO: 57) |
| AsCas12a | MTQFEGFTNLYQVSKTLRFELIPQGKTLKHIQEQGFIEEDKARNDHYKEL |
| nickase | KPIIDRIYKTYADQCLQLVQLDWENLSAAIDSYRKEKTEETRNALIEEQA |
| (e.g., | TYRNAIHDYFIGRTDNLTDAINKRHAEIYKGLFKAELFNGKVLKQLGTV |
| R1226A) | TTTEHENALLRSFDKFTTYFSGFYENRKNVFSAEDISTAIPHRIVQDNFPK |
| | FKENCHIFTRLITAVPSLREHFENVKKAIGIFVSTSIEEVFSFPFYNQLLTQ |
| | TQIDLYNQLLGGISREAGTEKIKGLNEVLNLAIQKNDETAHIIASLPHRFIP |
| | LFKQILSDRNTLSFILEEFKSDEEVIQSFCKYKTLLRNENVLETAEALFNE |
| | LNSIDLTHIFISHKKLETISSALCDHWDTLRNALYERRISELTGKITKSAKE |
| | KVQRSLKHEDINLQEIISAAGKELSEAFKQKTSEILSHAHAALDQPLPTTL |
| | KKQEEKEILKSQLDSLLGLYHLLDWFAVDESNEVDPEFSARLTGIKLEM |
| | EPSLSFYNKARNYATKKPYSVEKFKLNFQMPTLASGWDVNKEKNNGAI |
| | LFVKNGLYYLGIMPKQKGRYKALSFEPTEKTSEGFDKMYYDYFPDAAK |
| | MIPKCSTQLKAVTAHFQTHTTPILLSNNFIEPLEITKEIYDLNNPEKEPKKF |
| | QTAYAKKTGDQKGYREALCKWIDFTRDFLSKYTKTTSIDLSSLRPSSQY |
| | KDLGEYYAELNPLLYHISFQRIAEKEIMDAVETGKLYLFQIYNKDFAKG |
| | HHGKPNLHTLYWTGLFSPENLAKTSIKLNGQAELFYRPKSRMKRMAHR |
| | LGEKMLNKKLKDQKTPIPDTLYQELYDYVNHRLSHDLSDEARALLPNVI |
| | TKEVSHEIIKDRRFTSDKFFFHVPITLNYQAANSPSKFNQRVNAYLKEHP |
| | ETPIIGIDRGERNLIYITVIDSTGKILEQRSLNTIQQFDYQKKLDNREKERV |
| | AARQAWSVVGTIKDLKQGYLSQVIHEIVDLMIHYQAVVVLENLNFGFK |
| | SKRTGIAEKAVYQQFEKMLIDKLNCLVLKDYPAEKVGGVLNPYQLTDQ |
| | FTSFAKMGTQSGFLFYVPAPYTSKIDPLTGFVDPFVWKTIKNHESRKHFL |
| | EGFDFLHYDVKTGDFILHFKMNRNLSFQRGLPGFMPAWDIVFEKNETQF |
| | DAKGTPFIAGKRIVPVIENHRFTGRYRDLYPANELIALLEEKGIVFRDGSN |
| | ILPKLLENDDSHAIDTMVAHRSVLQMANSNAATGEDYINSPVRDLNGV |
| | CFDSRFQNPEWPMDADANGAYHIALKGQLLLNHLKESKDLKLQNGISN |
| | QDWLAYIQELRN (SEQ ID NO: 58) |
| LbCas12a | MNYKTGLEDFIGKESLSKTLRNALIPTESTKIHMEEMGVIRDDELRAEKQ |
| (previously | QELKEIMDDYYRTFIEEKLGQIQGIQWNSLFQKMEETMEDISVRKDLDKI |
| known as | QNEKRKEICCYFTSDKRFKDLFNAKLITDILPNFIKDNKEYTEEEKAEKE |
| Cpf1) | QTRVLFQRFATAFTNYFNQRRNNFSEDNISTAISFRIVNENSEIHLQNMR |
| Lachnospiraceae | AFQRIEQQYPEEVCGMEEEYKDMLQEWQMKHIYSVDFYDRELTQPGIE |
| bacterium | YYNGICGKINEHMNQFCQKNRINKNDFRMKKLHKQILCKKSSYYEIPFR |
| GAM79 | FESDQEVYDALNEFIKTMKKKEIIRRCVHLGQECDDYDLGKIYISSNKYE |
| Ref Seq. | QISNALYGSWDTIRKCIKEEYMDALPGKGEKKEEKAEAAAKKEEYRSIA |
| WP_11962 | DIDKIISLYGSEMDRTISAKKCITEICDMAGQISIDPLVCNSDIKLLQNKEK |
| 3382.1 | TTEIKTILDSFLHVYQWGQTFIVSDIIEKDSYFYSELEDVLEDFEGITTLYN |
| | HVRSYVTQKPYSTVKFKLHFGSPTLANGWSQSKEYDNNAILLMRDQKF |
| | YLGIFNVRNKPDKQIIKGHEKEEKGDYKKMIYNLLPGPSKMLPKVFITSR |
| | SGQETYKPSKHILDGYNEKRHIKSSPKFDLGYCWDLIDYYKECIHKHPD |
| | WKNYDFHFSDTKDYEDISGFYREVEMQGYQIKWTYISADEIQKLDEKG |
| | QIFLFQIYNKDFSVHSTGKDNLHTMYLKNLFSEENLKDIVLKLNGEAELF |
| | FRKASIKTPIVHKKGSVLVNRSYTQTVGNKEIRVSIPEEYYTEIYNYLNHI |
| | GKGKLSSEAQRYLDEGKIKSFTATKDIVKNYRYCCDHYFLHLPITINFKA |
| | KSDVAVNERTLAYIAKKEDIHIIGIDRGERNLLYISVVDVHGNIREQRSFN |
| | IVNGYDYQQKLKDREKSRDAARKNWEEIEKIKELKEGYLSMVIHYIAQL |
| | VVKYNAVVAMEDLNYGFKTGRFKVERQVYQKFETMLIEKLHYLVFKD |
| | REVCEEGGVLRGYQLTYIPESLKKVGKQCGFIFYVPAGYTSKIDPTTGFV |
| | NLFSFKNLTNRESRQDFVGKFDEIRYDRDKKMFEFSFDYNNYIKKGTILA |
| | STKWKVYTNGTRLKRIVVNGKYTSQSMEVELTDAMEKMLQRAGIEYH |
| | DGKDLKGQIVEKGIEAEIIDIFRLTVQMRNSRSESEDREYDRLISPVLNDK |
| | GEFFDTATADKTLPQDADANGAYCIALKGLYEVKQIKENWKENEQFPR |
| | NKLVQDNKTWFDFMQKKRYL (SEQ ID NO: 59) |
| PcCas12a - | MAKNFEDFKRLYSLSKTLRFEAKPIGATLDNIVKSGLLDEDEHRAASYV |
| previously | KVKKLIDEYHKVFIDRVLDDGCLPLENKGNNNSLAEYYESYVSRAQDE |
| known at | DAKKKFKEIQQNLRSVIAKKLTEDKAYANLFGNKLIESYKDKEDKKKII |
| Cpf1 | DSDLIQFINTAESTQLDSMSQDEAKELVKEFWGFVTYFYGFFDNRKNMY |
| Prevotella | TAEEKSTGIAYRLVNENLPKFIDNIEAFNRAITRPEIQENMGVLYSDFSEY |
| copri | LNVESIQEMFQLDYYNMLLTQKQIDVYNAIIGGKTDDEHDVKIKGINEYI |
| Ref Seq. | NLYNQQHKDDKLPKLKALFKQILSDRNAISWLPEEFNSDQEVLNAIKDC |
| WP_11922 | YERLAENVLGDKVLKSLLGSLADYSLDGIFIRNDLQLTDISQKMFGNWG |
| 7726.1 | VIQNAIMQNIKRVAPARKHKESEEDYEKRIAGIFKKADSFSISYINDCLNE |
| | ADPNNAYFVENYFATFGAVNTPTMQRENLFALVQNAYTEVAALLHSDY |
| | PTVKHLAQDKANVSKIKALLDAIKSLQHFVKPLLGKGDESDKDERFYGE |
| | LASLWAELDTVTPLYNMIRNYMTRKPYSQKKIKLNFENPQLLGGWDAN |
| | KEKDYATIILRRNGLYYLAIMDKDSRKLLGKAMPSDGECYEKMVYKFF |
| | KDVTTMIPKCSTQLKDVQAYFKVNTDDYVLNSKAFNKPLTITKEVFDLN |
| | NVLYGKYKKFQKGYLTATGDNVGYTHAVNVWIKFCMDFLNSYDSTCI |
| | YDFSSLKPESYLSLDAFYQDANLLLYKLSFARASVSYINQLVEEGKMYL |
| | FQIYNKDFSEYSKGTPNMHTLYWKALFDERNLADVVYKLNGQAEMFY |
| | RKKSIENTHPTHPANHPILNKNKDNKKKESLFDYDLIKDRRYTVDKFMF |
| | HVPITMNFKSVGSENINQDVKAYLRHADDMHIIGIDRGERHLLYLVVIDL |
| | QGNIKEQYSLNEIVNEYNGNTYHTNYHDLLDVREEERLKARQSWQTIEN |
| | IKELKEGYLSQVIHKITQLMVRYHAIVVLEDLSKGFMRSRQKVEKQVYQ |
| | KFEKMLIDKLNYLVDKKTDVSTPGGLLNAYQLTCKSDSSQKLGKQSGF |
| | LFYIPAWNTSKIDPVTGFVNLLDTHSLNSKEKIKAFFSKFDAIRYNKDKK |
| | WFEFNLDYDKFGKKAEDTRTKWTLCTRGMRIDTFRNKEKNSQWDNQE |
| | VDLTTEMKSLLEHYYIDIHGNLKDAISAQTDKAFFTGLLHILKLTLQMRN |
| | SITGTETDYLVSPVADENGIFYDSRSCGNQLPENADANGAYNIARKGLM |
| | LIEQIKNAEDLNNVKFDISNKAWLNFAQQKPYKNG (SEQ ID NO: 60) |
| ErCas12a - | MFSAKLISDILPEFVIHNNNYSASEKEEKTQVIKLFSRFATSFKDYFKNRA |
| previously | NCFSANDISSSSCHRIVNDNAEIFFSNALVYRRIVKNLSNDDINKISGDMK |
| known at | DSLKEMSLEEIYSYEKYGEFITQEGISFYNDICGKVNLFMNLYCQKNKEN |
| Cpf1 | KNLYKLRKLHKQILCIADTSYEVPYKFESDEEVYQSVNGFLDNISSKHIV |
| Eubacterium | ERLRKIGENYNGYNLDKIYIVSKFYESVSQKTYRDWETINTALEIHYNNI |
| rectale | LPGNGKSKADKVKKAVKNDLQKSITEINELVSNYKLCPDDNIKAETYIH |
| Ref Seq. | EISHILNNFEAQELKYNPEIHLVESELKASELKNVLDVIMNAFHWCSVFM |
| WP_11922 | TEELVDKDNNFYAELEEIYDEIYPVISLYNLVRNYVTQKPYSTKKIKLNF |
| 3642.1 | GIPTLADGWSKSKEYSNNAIILMRDNLYYLGIFNAKNKPDKKIIEGNTSE |
| | NKGDYKKMIYNLLPGPNKMPKVFLSSKTGVETYKPSAYILEGYKQNKH |
| | LKSSKDFDITFCHDLIDYFKNCIAIHPEWKNFGFDFSDTSTYEDISGFYRE |
| | VELQGYKIDWTYISEKDIDLLQEKGQLYLFQIYNKDFSKKSSGNDNLHT |
| | MYLKNLFSEENLKDIVLKLNGEAEIFFRKSSIKNPIIHKKGSILVNRTYEA |
| | EEKDQFGNIQIVRKTIPENIYQELYKYFNDKSDKELSDEAAKLKNVVGH |
| | HEAATNIVKDYRYTYDKYFLHMPITINFKANKTSFINDRILQYIAKEKDL |
| | HVIGIDRGERNLIYVSVIDTCGNIVEQKSFNIVNGYDYQIKLKQQEGARQI |
| | ARKEWKEIGKIKEIKEGYLSLVIHEISKMVIKYNAIIAMEDLSYGFKKGRF |
| | KVERQVYQKFETMLINKLNYLVFKDISITENGGLLKGYQLTYIPDKLKN |
| | VGHQCGCIFYVPAAYTSKIDPTTGFVNIFKFKDLTVDAKREFIKKFDSIRY |
| | DSDKNLFCFTFDYNNFITQNTVMSKSSWSVYTYGVRIKRRFVNGRFSNE |
| | SDTIDITKDMEKTLEMTDINWRDGHDLRQDIIDYEIVQHIFEIFKLTVQM |
| | RNSLSELEDRDYDRLISPVLNENNIFYDSAKAGDALPKDADANGAYCIA |
| | LKGLYEIKQITENWKEDGKFSRDKLKISNKDWFDFIQNKRYL (SEQ ID |
| | NO: 61) |
| CsCas12a - | MNYKTGLEDFIGKESLSKTLRNALIPTESTKIHMEEMGVIRDDELRAEKQ |
| previously | QELKEIMDDYYRAFIEEKLGQIQGIQWNSLFQKMEETMEDISVRKDLDKI |
| known at | QNEKRKEICCYFTSDKRFKDLFNAKLITDILPNFIKDNKEYTEEEKAEKE |
| Cpf1 | QTRVLFQRFATAFTNYFNQRRNNFSEDNISTAISFRIVNENSEIHLQNMR |
| Clostridium | AFQRIEQQYPEEVCGMEEEYKDMLQEWQMKHIYLVDFYDRVLTQPGIE |
| sp. AF34- | YYNGICGKINEHMNQFCQKNRINKNDFRMKKLHKQILCKKSSYYEIPFR |
| 10BH | FESDQEVYDALNEFIKTMKEKEIICRCVHLGQKCDDYDLGKIYISSNKYE |
| Ref Seq. | QISNALYGSWDTIRKCIKEEYMDALPGKGEKKEEKAEAAAKKEEYRSIA |
| WP_11853 | DIDKIISLYGSEMDRTISAKKCITEICDMAGQISTDPLVCNSDIKLLQNKE |
| 8418.1 | KTTEIKTILDSFLHVYQWGQTFIVSDIIEKDSYFYSELEDVLEDFEGITTLY |
| | NHVRSYVTQKPYSTVKFKLHFGSPTLANGWSQSKEYDNNAILLMRDQK |
| | FYLGIFNVRNKPDKQIIKGHEKEEKGDYKKMIYNLLPGPSKMLPKVFITS |
| | RSGQETYKPSKHILDGYNEKRHIKSSPKFDLGYCWDLIDYYKECIHKHP |
| | DWKNYDFHFSDTKDYEDISGFYREVEMQGYQIKWTYISADEIQKLDEK |
| | GQIFLFQIYNKDFSVHSTGKDNLHTMYLKNLFSEENLKDIVLKLNGEAEL |
| | FFRKASIKTPVVHKKGSVLVNRSYTQTVGDKEIRVSIPEEYYTEIYNYLN |
| | HIGRGKLSTEAQRYLEERKIKSFTATKDIVKNYRYCCDHYFLHLPITINFK |
| | AKSDIAVNERTLAYIAKKEDIHIIGIDRGERNLLYISVVDVHGNIREQRSF |
| | NIVNGYDYQQKLKDREKSRDAARKNWEEIEKIKELKEGYLSMVIHYIAQ |
| | LVVKYNAVVAMEDLNYGFKTGRFKVERQVYQKFETMLIEKLHYLVFK |
| | DREVCEEGGVLRGYQLTYIPESLKKVGKQCGFIFYVPAGYTSKIDPTTGF |
| | VNLFSFKNLTNRESRQDFVGKFDEIRYDRDKKMFEFSFDYNNYIKKGTM |
| | LASTKWKVYTNGTRLKRIVVNGKYTSQSMEVELTDAMEKMLQRAGIE |
| | YHDGKDLKGQIVEKGIEAEIIDIFRLTVQMRNSRSESEDREYDRLISPVLN |
| | DKGEFFDTATADKTLPQDADANGAYCIALKGLYEVKQIKENWKENEQF |
| | PRNKLVQDNKTWFDFMQKKRYL (SEQ ID NO: 62) |
| BhCas12b | MATRSFILKIEPNEEVKKGLWKTHEVLNHGIAYYMNILKLIRQEAIYEHH |
| Bacillus | EQDPKNPKKVSKAEIQAELWDFVLKMQKCNSFTHEVDKDEVFNILREL |
| hisashii | YEELVPSSVEKKGEANQLSNKFLYPLVDPNSQSGKGTASSGRKPRWYNL |
| Ref Seq. | KIAGDPSWEEEKKKWEEDKKKDPLAKILGKLAEYGLIPLFIPYTDSNEPI |
| WP_09514 | VKEIKWMEKSRNQSVRRLDKDMFIQALERFLSWESWNLKVKEEYEKVE |
| 2515.1 | KEYKTLEERIKEDIQALKALEQYEKERQEQLLRDTLNTNEYRLSKRGLR |
| | GWREIIQKWLKMDENEPSEKYLEVFKDYQRKHPREAGDYSVYEFLSKK |
| | ENHFIWRNHPEYPYLYATFCEIDKKKKDAKQQATFTLADPINHPLWVRF |
| | EERSGSNLNKYRILTEQLHTEKLKKKLTVQLDRLIYPTESGGWEEKGKV |
| | DIVLLPSRQFYNQIFLDIEEKGKHAFTYKDESIKFPLKGTLGGARVQFDR |
| | DHLRRYPHKVESGNVGRIYFNMTVNIEPTESPVSKSLKIHRDDFPKVVNF |
| | KPKELTEWIKDSKGKKLKSGIESLEIGLRVMSIDLGQRQAAAASIFEVVD |
| | QKPDIEGKLFFPIKGTELYAVHRASFNIKLPGETLVKSREVLRKAREDNL |
| | KLMNQKLNFLRNVLHFQQFEDITEREKRVTKWISRQENSDVPLVYQDEL |
| | IQIRELMYKPYKDWVAFLKQLHKRLEVEIGKEVKHWRKSLSDGRKGLY |
| | GISLKNIDEIDRTRKFLLRWSLRPTEPGEVRRLEPGQRFAIDQLNHLNALK |
| | EDRLKKMANTIIMHALGYCYDVRKKKWQAKNPACQIILFEDLSNYNPY |
| | EERSRFENSKLMKWSRREIPRQVALQGEIYGLQVGEVGAQFSSRFHAKT |
| | GSPGIRCSVVTKEKLQDNRFFKNLQREGRLTLDKIAVLKEGDLYPDKGG |
| | EKFISLSKDRKCVTTHADINAAQNLQKRFWTRTHGFYKVYCKAYQVDG |
| | QTVYIPESKDQKQKIIEEFGEGYFILKDGVYEWVNAGKLKIKKGSSKQSS |
| | SELVDSDILKDSFDLASELKGEKLMLYRDPSGNVFPSDKWMAAGVFFG |
| | KLERILISKLTNQYSISTIEDDSSKQSM (SEQ ID NO: 63) |
| ThCas12b | MSEKTTQRAYTLRLNRASGECAVCQNNSCDCWHDALWATHKAVNRG |
| Thermomonas | AKAFGDWLLTLRGGLCHTLVEMEVPAKGNNPPQRPTDQERRDRRVLLA |
| hydrothermalis | LSWLSVEDEHGAPKEFIVATGRDSADDRAKKVEEKLREILEKRDFQEHEI |
| Ref Seq. | DAWLQDCGPSLKAHIREDAVWVNRRALFDAAVERIKTLTWEEAWDFL |
| WP_07275 | EPFFGTQYFAGIGDGKDKDDAEGPARQGEKAKDLVQKAGQWLSARFGI |
| 4838 | GTGADFMSMAEAYEKIAKWASQAQNGDNGKATIEKLACALRPSEPPTL |
| | DTVLKCISGPGHKSATREYLKTLDKKSTVTQEDLNQLRKLADEDARNC |
| | RKKVGKKGKKPWADEVLKDVENSCELTYLQDNSPARHREFSVMLDHA |
| | ARRVSMAHSWIKKAEQRRRQFESDAQKLKNLQERAPSAVEWLDRFCES |
| | RSMTTGANTGSGYRIRKRAIEGWSYVVQAWAEASCDTEDKRIAAARKV |
| | QADPEIEKFGDIQLFEALAADEAICVWRDQEGTQNPSILIDYVTGKTAEH |
| | NQKRFKVPAYRHPDELRHPVFCDFGNSRWSIQFAIHKEIRDRDKGAKQD |
| | TRQLQNRHGLKMRLWNGRSMTDVNLHWSSKRLTADLALDQNPNPNPT |
| | EVTRADRLGRAASSAFDHVKIKNVFNEKEWNGRLQAPRAELDRIAKLE |
| | EQGKTEQAEKLRKRLRWYVSFSPCLSPSGPFIVYAGQHNIQPKRSGQYA |
| | PHAQANKGRARLAQLILSRLPDLRILSVDLGHRFAAACAVWETLSSDAF |
| | RREIQGLNVLAGGSGEGDLFLHVEMTGDDGKRRTVVYRRIGPDQLLDN |
| | TPHPAPWARLDRQFLIKLQGEDEGVREASNEELWTVHKLEVEVGRTVP |
| | LIDRMVRSGFGKTEKQKERLKKLRELGWISAMPNEPSAETDEKEGEIRSI |
| | SRSVDELMSSALGTLRLALKRHGNRARIAFAMTADYKPMPGGQKYYFH |
| | EAKEASKNDDETKRRDNQIEFLQDALSLWHDLFSSPDWEDNEAKKLWQ |
| | NHIATLPNYQTPEEISAELKRVERNKKRKENRDKLRTAAKALAENDQLR |
| | QHLHDTWKERWESDDQQWKERLRSLKDWIFPRGKAEDNPSIRHVGGLS |
| | ITRINTISGLYQILKAFKMRPEPDDLRKNIPQKGDDELENFNRRLLEARDR |
| | LREQRVKQLASRIIEAALGVGRIKIPKNGKLPKRPRTTVDTPCHAVVIESL |
| | KTYRPDDLRTRRENRQLMQWSSAKVRKYLKEGCELYGLHFLEVPANYT |
| | SRQCSRTGLPGIRCDDVPTGDFLKAPWWRRAINTAREKNGGDAKDRFL |
| | VDLYDHLNNLQSKGEALPATVRVPRQGGNLFIAGAQLDDTNKERRAIQ |
| | ADLNAAANIGLRALLDPDWRGRWWYVPCKDGTSEPALDRIEGSTAFND |
| | VRSLPTGDNSSRRAPREIENLWRDPSGDSLESGTWSPTRAYWDTVQSRV |
| | IELLRRHAGLPTS (SEQ ID NO: 64) |
| LsCas12b | MSIRSFKLKLKTKSGVNAEQLRRGLWRTHQLINDGIAYYMNWLVLLRQ |
| Laceyella | EDLFIRNKETNEIEKRSKEEIQAVLLERVHKQQQRNQWSGEVDEQTLLQ |
| sacchari | ALRQLYEEIVPSVIGKSGNASLKARFFLGPLVDPNNKTTKDVSKSGPTPK |
| WP_13222 | WKKMKDAGDPNWVQEYEKYMAERQTLVRLEEMGLIPLFPMYTDEVG |
| 1894.1 | DIHWLPQASGYTRTWDRDMFQQAIERLLSWESWNRRVRERRAQFEKKT |
| | HDFASRFSESDVQWMNKLREYEAQQEKSLEENAFAPNEPYALTKKALR |
| | GWERVYHSWMRLDSAASEEAYWQEVATCQTAMRGEFGDPAIYQFLAQ |
| | KENHDIWRGYPERVIDFAELNHLQRELRRAKEDATFTLPDSVDHPLWVR |
| | YEAPGGTNIHGYDLVQDTKRNLTLILDKFILPDENGSWHEVKKVPFSLA |
| | KSKQFHRQVWLQEEQKQKKREVVFYDYSTNLPHLGTLAGAKLQWDRN |
| | FLNKRTQQQIEETGEIGKVFFNISVDVRPAVEVKNGRLQNGLGKALTVL |
| | THPDGTKIVTGWKAEQLEKWVGESGRVSSLGLDSLSEGLRVMSIDLGQ |
| | RTSATVSVFEITKEAPDNPYKFFYQLEGTEMFAVHQRSFLLALPGENPPQ |
| | KIKQMREIRWKERNRIKQQVDQLSAILRLHKKVNEDERIQAIDKLLQKV |
| | ASWQLNEEIATAWNQALSQLYSKAKENDLQWNQAIKNAHHQLEPVVG |
| | KQISLWRKDLSTGRQGIAGLSLWSIEELEATKKLLTRWSKRSREPGVVK |
| | RIERFETFAKQIQHHINQVKENRLKQLANLIVMTALGYKYDQEQKKWIE |
| | VYPACQVVLFENLRSYRFSFERSRRENKKLMEWSHRSIPKLVQMQGELF |
| | GLQVADVYAAYSSRYHGRTGAPGIRCHALTEADLRNETNIIHELIEAGFI |
| | KEEHRPYLQQGDLVPWSGGELFATLQKPYDNPRILTLHADINAAQNIQK |
| | RFWHPSMWFRVNCESVMEGEIVTYVPKNKTVHKKQGKTFRFVKVEGS |
| | DVYEWAKWSKNRNKNTFSSITERKPPSSMILFRDPSGTFFKEQEWVEQK |
| | TFWGKVQSMIQAYMKKTIVQRMEE (SEQ ID NO: 65) |
| DtCas12b | MVLGRKDDTAELRRALWTTHEHVNLAVAEVERVLLRCRGRSYWTLDR |
| Dsulfonatronum | RGDPVHVPESQVAEDALAMAREAQRRNGWPVVGEDEEILLALRYLYEQ |
| thiodismutans | IVPSCLLDDLGKPLKGDAQKIGTNYAGPLFDSDTCRRDEGKDVACCGPF |
| WP_03138 | HEVAGKYLGALPEWATPISKQEFDGKDASHLRFKATGGDDAFFRVSIEK |
| 6437 | ANAWYEDPANQDALKNKAYNKDDWKKEKDKGISSWAVKYIQKQLQL |
| | GQDPRTEVRRKLWLELGLLPLFIPVFDKTMVGNLWNRLAVRLALAHLL |
| | SWESWNHRAVQDQALARAKRDELAALFLGMEDGFAGLREYELRRNESI |
| | KQHAFEPVDRPYVVSGRALRSWTRVREEWLRHGDTQESRKNICNRLQD |
| | RLRGKFGDPDVFHWLAEDGQEALWKERDCVTSFSLLNDADGLLEKRK |
| | GYALMTFADARLHPRWAMYEAPGGSNLRTYQIRKTENGLWADVVLLS |
| | PRNESAAVEEKTFNVRLAPSGQLSNVSFDQIQKGSKMVGRCRYQSANQ |
| | QFEGLLGGAEILFDRKRIANEQHGATDLASKPGHVWFKLTLDVRPQAPQ |
| | GWLDGKGRPALPPEAKHFKTALSNKSKFADQVRPGLRVLSVDLGVRSF |
| | AACSVFELVRGGPDQGTYFPAADGRTVDDPEKLWAKHERSFKITLPGEN |
| | PSRKEEIARRAAMEELRSLNGDIRRLKAILRLSVLQEDDPRTEHLRLFME |
| | AIVDDPAKSALNAELFKGFGDDRFRSTPDLWKQHCHFFHDKAEKVVAE |
| | RFSRWRTETRPKSSSWQDWRERRGYAGGKSYWAVTYLEAVRGLILRW |
| | NMRGRTYGEVNRQDKKQFGTVASALLHHINQLKEDRIKTGADMIIQAA |
| | RGFVPRKNGAGWVQVHEPCRLILFEDLARYRFRTDRSRRENSRLMRWS |
| | HREIVNEVGMQGELYGLHVDTTEAGFSSRYLASSGAPGVRCRHLVEEDF |
| | HDGLPGMHLVGELDWLLPKDKDRTANEARRLLGGMVRPGMLVPWDG |
| | GELFATLNAASQLHVIHADINAAQNLQRRFWGRCGEAIRIVCNQLSVDG |
| | STRYEMAKAPKARLLGALQQLKNGDAPFHLTSIPNSQKPENSYVMTPTN |
| | AGKKYRAGPGEKSSGEEDELALDIVEQAEELAQGRKTFFRDPSGVFFAP |
| | DRWLPSEIYWSRIRRRIWQVTLERNSSGRQERAEMDEMPY (SEQ ID NO: |
| | 66) |

[0138] The genome editing system described herein may also comprise Cas12a (Cpf1) (dCpf1) variants that may be used as a guide nucleotide sequence-programmable DNA-binding protein domain. The Cas112a (Cpf1) protein has a RuvC-like endonuclease domain that is similar to the RuvC domain of Cas9 but does not have a HNH endonuclease domain, and the N-terminal of Cas12a (Cpf1) does not have the alfa-helical recognition lobe of Cas9. It was shown in Zetsche et al., Cell, 163, 759-771, 2015 (which is incorporated herein by reference) that, the RuvC-like domain of Cas12a (Cpf1) is responsible for cleaving both DNA strands and inactivation of the RuvC-like domain inactivates Cas12a (Cpf1) nuclease activity.

[0139] In some embodiments, the napDNAbp is a single effector of a microbial CRISPR-Cas system. Single effectors of microbial CRISPR-Cas systems include, without limitation, Cas9, Cas12a (Cpf1), Cas12b1 (C2c1), Cas13a (C2c2), and Cas12c (C2c3). Typically, microbial CRISPR-Cas systems are divided into Class 1 and Class 2 systems. Class 1 systems have multisubunit effector complexes, while Class 2 systems have a single protein effector. For example, Cas9 and Cas12a (Cpf1) are Class 2 effectors. In addition to Cas9 and Cas12a (Cpf1), three distinct Class 2 CRISPR-Cas systems (Cas12b1, Cas13a, and Cas12c) have been described by Shmakov et al., “Discovery and Functional Characterization of Diverse Class 2 CRISPR Cas Systems”, Mol. Cell, 2015 Nov. 5; 60(3): 385-397, the entire contents of which are hereby incorporated by reference.

[0140] Effectors of two of the systems, Cas12b1 and Cas12c, contain RuvC-like endonuclease domains related to Cas12a. A third system, Cas13a contains an effector with two predicated HEPN RNase domains. Production of mature CRISPR RNA is tracrRNA-independent, unlike production of CRISPR RNA by Cas12b1. Cas12b1 depends on both CRISPR RNA and tracrRNA for DNA cleavage. Bacterial Cas13a has been shown to possess a unique RNase activity for CRISPR RNA maturation distinct from its RNA-activated single-stranded RNA degradation activity. These RNase functions are different from each other and from the CRISPR RNA-processing behavior of Cas12a. See, e.g., East-Seletsky, et al., “Two distinct RNase activities of CRISPR-Cas13a enable guide-RNA processing and RNA detection”, Nature, 2016 Oct. 13; 538(7624):270-273, the entire contents of which are hereby incorporated by reference. In vitro biochemical analysis of Cas13a in Leptotrichia shahii has shown that Cas13a is guided by a single CRISPR RNA and can be programed to cleave ssRNA targets carrying complementary protospacers. Catalytic residues in the two conserved HEPN domains mediate cleavage. Mutations in the catalytic residues generate catalytically inactive RNA-binding proteins. See e.g., Abudayyeh et al., “C2c2 is a single-component programmable RNA-guided RNA-targeting CRISPR effector”, Science, 2016 Aug. 5; 353(6299), the entire contents of which are hereby incorporated by reference.

[0141] The crystal structure of Alicyclobacillus acidoterrestris Cas12b1 (AacC2c1) has been reported in complex with a chimeric single-molecule guide RNA (sgRNA). See e.g., Liu et al., “C2c1-sgRNA Complex Structure Reveals RNA-Guided DNA Cleavage Mechanism”, Mol. Cell, 2017 Jan. 19; 65(2):310-322, the entire contents of which are hereby incorporated by reference. The crystal structure has also been reported in Alicyclobacillus acidoterrestris C2c1 bound to target DNAs as ternary complexes. See e.g., Yang et al., “PAM-dependent Target DNA Recognition and Cleavage by C2C1 CRISPR-Cas endonuclease”, Cell, 2016 Dec. 15; 167(7):1814-1828, the entire contents of which are hereby incorporated by reference. Catalytically competent conformations of AacC2c1, both with target and non-target DNA strands, have been captured independently positioned within a single RuvC catalytic pocket, with C2c1-mediated cleavage resulting in a staggered seven-nucleotide break of target DNA. Structural comparisons between C2c1 ternary complexes and previously identified Cas9 and Cpf1 counterparts demonstrate the diversity of mechanisms used by CRISPR-Cas9 systems.

[0142] In some embodiments, the napDNAbp may be a C2c1, a C2c2, or a C2c3 protein. In some embodiments, the napDNAbp is a C2c1 protein. In some embodiments, the napDNAbp is a Cas13a protein. In some embodiments, the napDNAbp is a Cas12c protein. In some embodiments, the napDNAbp comprises an amino acid sequence that is at least 85%, at least 90%, at least 91%, at least 92%, at least 93%, at least 94%, at least 95%, at least 96%, at least 97%, at least 98%, at least 99%, or at least 99.5% identical to a naturally-occurring Cas12b1 (C2c1), Cas13a (C2c2), or Cas12c (C2c3) protein. In some embodiments, the napDNAbp is a naturally-occurring Cas12b1 (C2c1), Cas13a (C2c2), or Cas12c (C2c3) protein.

### H. Cas9 Circular Permutants

[0143] In various embodiments, the genome editing system disclosed herein may comprise a circular permutant of Cas9.

[0144] The term “circularly permuted Cas9” or “circular permutant” of Cas9 or “CP-Cas9”) refers to any Cas9 protein, or variant thereof, that occurs or has been modify to engineered as a circular permutant variant, which means the N-terminus and the C-terminus of a Cas9 protein (e.g., a wild type Cas9 protein) have been topically rearranged. Such circularly permuted Cas9 proteins, or variants thereof, retain the ability to bind DNA when complexed with a guide RNA (gRNA). See, Oakes et al., “Protein Engineering of Cas9 for enhanced function,” Methods Enzymol, 2014, 546: 491-511 and Oakes et al., “CRISPR-Cas9 Circular Permutants as Programmable Scaffolds for Genome Modification,” Cell, Jan. 10, 2019, 176: 254-267, each of are incorporated herein by reference. The instant disclosure contemplates any previously known CP-Cas9 or use a new CP-Cas9 so long as the resulting circularly permuted protein retains the ability to bind DNA when complexed with a guide RNA (gRNA).

[0145] Any of the Cas9 proteins described herein, including any variant, ortholog, or naturally occurring Cas9 or equivalent thereof, may be reconfigured as a circular permutant variant.

[0146] In various embodiments, the circular permutants of Cas9 may have the following structure:

[0147] N-terminus-[original C-terminus]-[optional linker]-[original N-terminus]-C-terminus.

[0148] As an example, the present disclosure contemplates the following circular permutants of canonical S. pyogenes Cas9 (1368 amino acids of UniProtKB—Q99ZW2 (CAS9_STRP1) (numbering is based on the amino acid position in SEQ ID NO: 11)):

[0149] N-terminus-[1268-1368]-[optional linker]-[1-1267]-C-terminus;

[0150] N-terminus-[1168-1368]-[optional linker]-[1-1167]-C-terminus;

[0151] N-terminus-[1068-1368]-[optional linker]-[1-1067]-C-terminus;

[0152] N-terminus-[968-1368]-[optional linker]-[1-967]-C-terminus;

[0153] N-terminus-[868-1368]-[optional linker]-[1-867]-C-terminus;

[0154] N-terminus-[768-1368]-[optional linker]-[1-767]-C-terminus;

[0155] N-terminus-[668-1368]-[optional linker]-[1-667]-C-terminus;

[0156] N-terminus-[568-1368]-[optional linker]-[1-567]-C-terminus;

[0157] N-terminus-[468-1368]-[optional linker]-[1-467]-C-terminus;

[0158] N-terminus-[368-1368]-[optional linker]-[1-367]-C-terminus;

[0159] N-terminus-[268-1368]-[optional linker]-[1-267]-C-terminus;

[0160] N-terminus-[168-1368]-[optional linker]-[1-167]-C-terminus;

[0161] N-terminus-[68-1368]-[optional linker]-[1-67]-C-terminus; or

[0162] N-terminus-[10-1368]-[optional linker]-[1-9]-C-terminus, or the corresponding circular permutants of other Cas9 proteins (including other Cas9 orthologs, variants, etc).

[0163] In particular embodiments, the circular permuant Cas9 has the following structure (based on S. pyogenes Cas9 (1368 amino acids of UniProtKB—Q99ZW2 (CAS9_STRP1) (numbering is based on the amino acid position in SEQ ID NO: 11):

[0164] N-terminus-[102-1368]-[optional linker]-[1-101]-C-terminus;

[0165] N-terminus-[1028-1368]-[optional linker]-[1-1027]-C-terminus;

[0166] N-terminus-[1041-1368]-[optional linker]-[1-1043]-C-terminus;

[0167] N-terminus-[1249-1368]-[optional linker]-[1-1248]-C-terminus; or

[0168] N-terminus-[1300-1368]-[optional linker]-[1-1299]-C-terminus, or the corresponding circular permutants of other Cas9 proteins (including other Cas9 orthologs, variants, etc).

[0169] In still other embodiments, the circular permuant Cas9 has the following structure (based on S. pyogenes Cas9 (1368 amino acids of UniProtKB—Q99ZW2 (CAS9_STRP1) (numbering is based on the amino acid position in SEQ ID NO: 11):

[0170] N-terminus-[103-1368]-[optional linker]-[1-102]-C-terminus;

[0171] N-terminus-[1029-1368]-[optional linker]-[1-1028]-C-terminus;

[0172] N-terminus-[1042-1368]-[optional linker]-[1-1041]-C-terminus;

[0173] N-terminus-[1250-1368]-[optional linker]-[1-1249]-C-terminus; or

[0174] N-terminus-[1301-1368]-[optional linker]-[1-1300]-C-terminus, or the corresponding circular permutants of other Cas9 proteins (including other Cas9 orthologs, variants, etc).

[0175] In some embodiments, the circular permutant can be formed by linking a C-terminal fragment of a Cas9 to an N-terminal fragment of a Cas9, either directly or by using a linker, such as an amino acid linker. In some embodiments, The C-terminal fragment may correspond to the C-terminal 95% or more of the amino acids of a Cas9 (e.g., amino acids about 1300-1368), or the C-terminal 90%, 85%, 80%, 75%, 70%, 65%, 60%, 55%, 50%, 45%, 40%, 35%, 30%, 25%, 20%, 15%, 10%, or 5% or more of a Cas9 (e.g., any one of SEQ ID NOs: 77-86). The N-terminal portion may correspond to the N-terminal 95% or more of the amino acids of a Cas9 (e.g., amino acids about 1-1300), or the N-terminal 90%, 85%, 80%, 75%, 70%, 65%, 60%, 55%, 50%, 45%, 40%, 35%, 30%, 25%, 20%, 15%, 10%, or 5% or more of a Cas9 (e.g., of SEQ ID NO: 11).

[0176] In some embodiments, the circular permutant can be formed by linking a C-terminal fragment of a Cas9 to an N-terminal fragment of a Cas9, either directly or by using a linker, such as an amino acid linker. In some embodiments, the C-terminal fragment that is rearranged to the N-terminus, includes or corresponds to the C-terminal 30% or less of the amino acids of a Cas9 (e.g., amino acids 1012-1368 of SEQ ID NO: 11). In some embodiments, the C-terminal fragment that is rearranged to the N-terminus, includes or corresponds to the C-terminal 30%, 29%, 28%, 27%, 26%, 25%, 24%, 23%, 22%, 21%, 20%, 19%, 18%, 17%, 16%, 15%, 14%, 13%, 12%, 11%, 10%, 9%, 8%, 7%, 6%, 5%, 4%, 3%, 2%, or 1% of the amino acids of a Cas9 (e.g., the Cas9 of SEQ ID NO: 11). In some embodiments, the C-terminal fragment that is rearranged to the N-terminus, includes or corresponds to the C-terminal 410 residues or less of a Cas9 (e.g., the Cas9 of SEQ ID NO: 11. In some embodiments, the C-terminal portion that is rearranged to the N-terminus, includes or corresponds to the C-terminal 410, 400, 390, 380, 370, 360, 350, 340, 330, 320, 310, 300, 290, 280, 270, 260, 250, 240, 230, 220, 210, 200, 190, 180, 170, 160, 150, 140, 130, 120, 110, 100, 90, 80, 70, 60, 50, 40, 30, 20, or 10 residues of a Cas9 (e.g., the Cas9 of SEQ ID NO: 11). In some embodiments, the C-terminal portion that is rearranged to the N-terminus, includes or corresponds to the C-terminal 357, 341, 328, 120, or 69 residues of a Cas9 (e.g., the Cas9 of SEQ ID NO: 11).

[0177] In other embodiments, circular permutant Cas9 variants may be defined as a topological rearrangement of a Cas9 primary structure based on the following method, which is based on S. pyogenes Cas9 of SEQ ID NO: 11: (a) selecting a circular permutant (CP) site corresponding to an internal amino acid residue of the Cas9 primary structure, which dissects the original protein into two halves: an N-terminal region and a C-terminal region; (b) modifying the Cas9 protein sequence (e.g., by genetic engineering techniques) by moving the original C-terminal region (comprising the CP site amino acid) to preceed the original N-terminal region, thereby forming a new N-terminus of the Cas9 protein that now begins with the CP site amino acid residue. The CP site can be located in any domain of the Cas9 protein, including, for example, the helical-II domain, the RuvCIII domain, or the CTD domain. For example, the CP site may be located (relative the S. pyogenes Cas9 of SEQ ID NO: 18) at original amino acid residue 181, 199, 230, 270, 310, 1010, 1016, 1023, 1029, 1041, 1247, 1249, or 1282. Thus, once relocated to the N-terminus, original amino acid 181, 199, 230, 270, 310, 1010, 1016, 1023, 1029, 1041, 1247, 1249, or 1282 would become the new N-terminal amino acid. Nomenclature of these CP-Cas9 proteins may be referred to as Cas9-CP¹⁸¹, Cas9-CP¹⁹⁹, Cas9-CP²³⁰, Cas9-CP²⁷⁰, Cas9-CP³¹⁰, Cas9-CP¹⁰¹⁰, Cas9-CP¹⁰¹⁶, Cas9-CP¹⁰²³, Cas9-CP¹⁰²⁹, Cas9-CP¹⁰⁴¹, Cas9-CP¹²⁴⁷, Cas9-CP¹²⁴⁹, and Cas9-CP¹²⁸², respectively. This description is not meant to be limited to making CP variants from SEQ ID NO: 18, but may be implemented to make CP variants in any Cas9 sequence, either at CP sites that correspond to these positions, or at other CP sites entirely. This description is not meant to limit the specific CP sites in any way. Virtually any CP site may be used to form a CP-Cas9 variant.

[0178] Exemplary CP-Cas9 amino acid sequences, based on the Cas9 of SEQ ID NO: 11, are provided below in which linker sequences are indicated by underlining and optional methionine (M) residues are indicated in bold. It should be appreciated that the disclosure provides CP-Cas9 sequences that do not include a linker sequence or that include different linker sequences. It should be appreciated that CP-Cas9 sequences may be based on Cas9 sequences other than that of SEQ ID NO: 11 and any examples provided herein are not meant to be limiting. Exemplary CP-Cas9 sequences are as follows:

| CP name | Sequence | SEQ ID NO: |
|---|---|---|
| CP1012 | DYKVYDVRKMIAKSEQEIGKATAKYFFYSNIMNFFKTE | SEQ ID NO: |
| | ITLANGEIRKRPLIETNGETGEIVWDKGRDFATVRKVLS | 67 |
| | MPQVNIVKKTEVQTGGFSKESILPKRNSDKLIARKKDW | |
| | DPKKYGGFDSPTVAYSVLVVAKVEKGKSKKLKSVKEL | |
| | LGITIMERSSFEKNPIDFLEAKGYKEVKKDLIIKLPKYSL | |
| | FELENGRKRMLASAGELQKGNELALPSKYVNFLYLAS | |
| | HYEKLKGSPEDNEQKQLFVEQHKHYLDEIIEQISEFSKR | |
| | VILADANLDKVLSAYNKHRDKPIREQAENIIHLFTLTNL | |
| | GAPAAFKYFDTTIDRKRYTSTKEVLDATLIHQSITGLYE | |
| | TRIDLSQLGGDGGSGGSGGSGGSGGSGGSGGDKKYSIG | |
| | LAIGTNSVGWAVITDEYKVPSKKFKVLGNTDRHSIKKN | |
| | LIGALLFDSGETAEATRLKRTARRRYTRRKNRICYLQEI | |
| | FSNEMAKVDDSFFHRLEESFLVEEDKKHERHPIFGNIVD | |
| | EVAYHEKYPTIYHLRKKLVDSTDKADLRLIYLALAHMI | |
| | KFRGHFLIEGDLNPDNSDVDKLFIQLVQTYNQLFEENPI | |
| | NASGVDAKAILSARLSKSRRLENLIAQLPGEKKNGLFG | |
| | NLIALSLGLTPNFKSNFDLAEDAKLQLSKDTYDDDLDN | |
| | LLAQIGDQYADLFLAAKNLSDAILLSDILRVNTEITKAP | |
| | LSASMIKRYDEHHQDLTLLKALVRQQLPEKYKEIFFDQ | |
| | SKNGYAGYIDGGASQEEFYKFIKPILEKMDGTEELLVK | |
| | LNREDLLRKQRTFDNGSIPHQIHLGELHAILRRQEDFYP | |
| | FLKDNREKIEKILTFRIPYYVGPLARGNSRFAWMTRKSE | |
| | ETITPWNFEEVVDKGASAQSFIERMTNFDKNLPNEKVL | |
| | PKHSLLYEYFTVYNELTKVKYVTEGMRKPAFLSGEQK | |
| | KAIVDLLFKTNRKVTVKQLKEDYFKKIECFDSVETSGV | |
| | EDRFNASLGTYHDLLKIIKDKDFLDNEENEDILEDIVLT | |
| | LTLFEDREMIEERLKTYAHLFDDKVMKQLKRRRYTGW | |
| | GRLSRKLINGIRDKQSGKTILDFLKSDGFANRNFMQLIH | |
| | DDSLTFKEDIQKAQVSGQGDSLHEHIANLAGSPAIKKGI | |
| | LQTVKVVDELVKVMGRHKPENIVIEMARENQTTQKGQ | |
| | KNSRERMKRIEEGIKELGSQILKEHPVENTQLQNEKLYL | |
| | YYLQNGRDMYVDQELDINRLSDYDVDHIVPQSFLKDD | |
| | SIDNKVLTRSDKNRGKSDNVPSEEVVKKMKNYWRQLL | |
| | NAKLITQRKFDNLTKAERGGLSELDKAGFIKRQLVETR | |
| | QITKHVAQILDSRMNTKYDENDKLIREVKVITLKSKLVS | |
| | DFRKDFQFYKVREINNYHHAHDAYLNAVVGTALIKKY | |
| | PKLESEFVYG | |
| CP1028 | EIGKATAKYFFYSNIMNFFKTEITLANGEIRKRPLIETNG | SEQ ID NO: |
| | ETGEIVWDKGRDFATVRKVLSMPQVNIVKKTEVQTGG | 68 |
| | FSKESILPKRNSDKLIARKKDWDPKKYGGFDSPTVAYS | |
| | VLVVAKVEKGKSKKLKSVKELLGITIMERSSFEKNPIDF | |
| | LEAKGYKEVKKDLIIKLPKYSLFELENGRKRMLASAGE | |
| | LQKGNELALPSKYVNFLYLASHYEKLKGSPEDNEQKQ | |
| | LFVEQHKHYLDEIIEQISEFSKRVILADANLDKVLSAYN | |
| | KHRDKPIREQAENIIHLFTLTNLGAPAAFKYFDTTIDRK | |
| | RYTSTKEVLDATLIHQSITGLYETRIDLSQLGGDGGSGG | |
| | SGGSGGSGGSGGSGGMDKKYSIGLAIGTNSVGWAVIT | |
| | DEYKVPSKKFKVLGNTDRHSIKKNLIGALLFDSGETAE | |
| | ATRLKRTARRRYTRRKNRICYLQEIFSNEMAKVDDSFF | |
| | HRLEESFLVEEDKKHERHPIFGNIVDEVAYHEKYPTIYH | |
| | LRKKLVDSTDKADLRLIYLALAHMIKFRGHFLIEGDLN | |
| | PDNSDVDKLFIQLVQTYNQLFEENPINASGVDAKAILS | |
| | ARLSKSRRLENLIAQLPGEKKNGLFGNLIALSLGLTPNF | |
| | KSNFDLAEDAKLQLSKDTYDDDLDNLLAQIGDQYADL | |
| | FLAAKNLSDAILLSDILRVNTEITKAPLSASMIKRYDEH | |
| | HQDLTLLKALVRQQLPEKYKEIFFDQSKNGYAGYIDG | |
| | GASQEEFYKFIKPILEKMDGTEELLVKLNREDLLRKQR | |
| | TFDNGSIPHQIHLGELHAILRRQEDFYPFLKDNREKIEKI | |
| | LTFRIPYYVGPLARGNSRFAWMTRKSEETITPWNFEEV | |
| | VDKGASAQSFIERMTNFDKNLPNEKVLPKHSLLYEYFT | |
| | VYNELTKVKYVTEGMRKPAFLSGEQKKAIVDLLFKTN | |
| | RKVTVKQLKEDYFKKIECFDSVETSGVEDRFNASLGTY | |
| | HDLLKIIKDKDFLDNEENEDILEDIVLTLTLFEDREMIEE | |
| | RLKTYAHLFDDKVMKQLKRRRYTGWGRLSRKLINGIR | |
| | DKQSGKTILDFLKSDGFANRNFMQLIHDDSLTFKEDIQ | |
| | KAQVSGQGDSLHEHIANLAGSPAIKKGILQTVKVVDEL | |
| | VKVMGRHKPENIVIEMARENQTTQKGQKNSRERMKRI | |
| | EEGIKELGSQILKEHPVENTQLQNEKLYLYYLQNGRD | |
| | MYVDQELDINRLSDYDVDHIVPQSFLKDDSIDNKVLTR | |
| | SDKNRGKSDNVPSEEVVKKMKNYWRQLLNAKLITQR | |
| | KFDNLTKAERGGLSELDKAGFIKRQLVETRQITKHVAQ | |
| | ILDSRMNTKYDENDKLIREVKVITLKSKLVSDFRKDFQ | |
| | FYKVREINNYHHAHDAYLNAVVGTALIKKYPKLESEF | |
| | VYGDYKVYDVRKMIAKSEQ | |
| CP1041 | NIMNFFKTEITLANGEIRKRPLIETNGETGEIVWDKGRD | SEQ ID NO: |
| | FATVRKVLSMPQVNIVKKTEVQTGGFSKESILPKRNSD | 69 |
| | KLIARKKDWDPKKYGGFDSPTVAYSVLVVAKVEKGK | |
| | SKKLKSVKELLGITIMERSSFEKNPIDFLEAKGYKEVKK | |
| | DLIIKLPKYSLFELENGRKRMLASAGELQKGNELALPS | |
| | KYVNFLYLASHYEKLKGSPEDNEQKQLFVEQHKHYLD | |
| | EIIEQISEFSKRVILADANLDKVLSAYNKHRDKPIREQA | |
| | ENIIHLFTLTNLGAPAAFKYFDTTIDRKRYTSTKEVLDA | |
| | TLIHQSITGLYETRIDLSQLGGDGGSGGSGGSGGSGGSG | |
| | GSGGDKKYSIGLAIGTNSVGWAVITDEYKVPSKKFKVL | |
| | GNTDRHSIKKNLIGALLFDSGETAEATRLKRTARRRYT | |
| | RRKNRICYLQEIFSNEMAKVDDSFFHRLEESFLVEEDK | |
| | KHERHPIFGNIVDEVAYHEKYPTIYHLRKKLVDSTDKA | |
| | DLRLIYLALAHMIKFRGHFLIEGDLNPDNSDVDKLFIQL | |
| | VQTYNQLFEENPINASGVDAKAILSARLSKSRRLENLIA | |
| | QLPGEKKNGLFGNLIALSLGLTPNFKSNFDLAEDAKLQ | |
| | LSKDTYDDDLDNLLAQIGDQYADLFLAAKNLSDAILLS | |
| | DILRVNTEITKAPLSASMIKRYDEHHQDLTLLKALVRQ | |
| | QLPEKYKEIFFDQSKNGYAGYIDGGASQEEFYKFIKPIL | |
| | EKMDGTEELLVKLNREDLLRKQRTFDNGSIPHQIHLGE | |
| | LHAILRRQEDFYPFLKDNREKIEKILTFRIPYYVGPLAR | |
| | GNSRFAWMTRKSEETITPWNFEEVVDKGASAQSFIER | |
| | MTNFDKNLPNEKVLPKHSLLYEYFTVYNELTKVKYVT | |
| | EGMRKPAFLSGEQKKAIVDLLFKTNRKVTVKQLKEDY | |
| | FKKIECFDSVEISGVEDRFNASLGTYHDLLKIIKDKDFL | |
| | DNEENEDILEDIVLTLTLFEDREMIEERLKTYAHLFDDK | |
| | VMKQLKRRRYTGWGRLSRKLINGIRDKQSGKTILDFL | |
| | KSDGFANRNFMQLIHDDSLTFKEDIQKAQVSGQGDSL | |
| | HEHIANLAGSPAIKKGILQTVKVVDELVKVMGRHKPE | |
| | NIVIEMARENQTTQKGQKNSRERMKRIEEGIKELGSQIL | |
| | KEHPVENTQLQNEKLYLYYLQNGRDMYVDQELDINR | |
| | LSDYDVDHIVPQSFLKDDSIDNKVLTRSDKNRGKSDNV | |
| | PSEEVVKKMKNYWRQLLNAKLITQRKFDNLTKAERG | |
| | GLSELDKAGFIKRQLVETRQITKHVAQILDSRMNTKYD | |
| | ENDKLIREVKVITLKSKLVSDFRKDFQFYKVREINTNYH | |
| | HAHDAYLNAVVGTALIKKYPKLESEFVYGDYKVYDV | |
| | RKMIAKSEQEIGKATAKYFFYS | |
| CP1249 | PEDNEQKQLFVEQHKHYLDEIIEQISEFSKRVILADANL | SEQ ID NO: |
| | DKVLSAYNKHRDKPIREQAENIIHLFTLTNLGAPAAFK | 70 |
| | YFDTTIDRKRYTSTKEVLDATLIHQSITGLYETRIDLSQL | |
| | GGDGGSGGSGGSGGSGGSGGSGGMDKKYSIGLAIGTN | |
| | SVGWAVITDEYKVPSKKFKVLGNTDRHSIKKNLIGALL | |
| | FDSGETAEATRLKRTARRRYTRRKNRICYLQEIFSNEM | |
| | AKVDDSFFHRLEESFLVEEDKKHERHPIFGNIVDEVAY | |
| | HEKYPTIYHLRKKLVDSTDKADLRLIYLALAHMIKFRG | |
| | HFLIEGDLNPDNSDVDKLFIQLVQTYNQLFEENPINASG | |
| | VDAKAILSARLSKSRRLENLIAQLPGEKKNGLFGNLIAL | |
| | SLGLTPNFKSNFDLAEDAKLQLSKDTYDDDLDNLLAQI | |
| | GDQYADLFLAAKNLSDAILLSDILRVNTEITKAPLSAS | |
| | MIKRYDEHHQDLTLLKALVRQQLPEKYKEIFFDQSKN | |
| | GYAGYIDGGASQEEFYKFIKPILEKMDGTEELLVKLNR | |
| | EDLLRKQRTFDNGSIPHQIHLGELHAILRRQEDFYPFLK | |
| | DNREKIEKILTFRIPYYVGPLARGNSRFAWMTRKSEETI | |
| | TPWNFEEVVDKGASAQSFIERMTNFDKNLPNEKVLPK | |
| | HSLLYEYFTVYNELTKVKYVTEGMRKPAFLSGEQKKA | |
| | IVDLLFKTNRKVTVKQLKEDYFKKIECFDSVETSGVED | |
| | RFNASLGTYHDLLKIIKDKDFLDNEENEDILEDIVLTLT | |
| | LFEDREMIEERLKTYAHLFDDKVMKQLKRRRYTGWG | |
| | RLSRKLINGIRDKQSGKTILDFLKSDGFANRNFMQLIHD | |
| | DSLTFKEDIQKAQVSGQGDSLHEHIANLAGSPAIKKGIL | |
| | QTVKVVDELVKVMGRHKPENIVIEMARENQTTQKGQ | |
| | KNSRERMKRIEEGIKELGSQILKEHPVENTQLQNEKLY | |
| | LYYLQNGRDMYVDQELDINRLSDYDVDHIVPQSFLKD | |
| | DSIDNKVLTRSDKNRGKSDNVPSEEVVKKMKNYWRQ | |
| | LLNAKLITQRKFDNLTKAERGGLSELDKAGFIKRQLVE | |
| | TRQITKHVAQILDSRMNTKYDENDKLIREVKVITLKSK | |
| | LVSDFRKDFQFYKVREINNYHHAHDAYLNAVVGTALI | |
| | KKYPKLESEFVYGDYKVYDVRKMIAKSEQEIGKATAK | |
| | YFFYSNIMNFFKTEITLANGEIRKRPLIETNGETGEIVW | |
| | DKGRDFATVRKVLSMPQVNIVKKTEVQTGGFSKESILP | |
| | KRNSDKLIARKKDWDPKKYGGFDSPTVAYSVLVVAK | |
| | VEKGKSKKLKSVKELLGITIMERSSFEKNPIDFLEAKGY | |
| | KEVKKDLIIKLPKYSLFELENGRKRMLASAGELQKGNE | |
| | LALPSKYVNFLYLASHYEKLKGS | |
| CP1300 | KPIREQAENIIHLFTLTNLGAPAAFKYFDTTIDRKRYTST | SEQ ID NO: |
| | KEVLDATLIHQSITGLYETRIDLSQLGGDGGSGGSGGS | 71 |
| | GGSGGSGGSGGDKKYSIGLAIGTNSVGWAVITDEYKV | |
| | PSKKFKVLGNTDRHSIKKNLIGALLFDSGETAEATRLK | |
| | RTARRRYTRRKNRICYLQEIFSNEMAKVDDSFFHRLEE | |
| | SFLVEEDKKHERHPIFGNIVDEVAYHEKYPTIYHLRKK | |
| | LVDSTDKADLRLIYLALAHMIKFRGHFLIEGDLNPDNS | |
| | DVDKLFIQLVQTYNQLFEENPINASGVDAKAILSARLS | |
| | KSRRLENLIAQLPGEKKNGLFGNLIALSLGLTPNFKSNF | |
| | DLAEDAKLQLSKDTYDDDLDNLLAQIGDQYADLFLAA | |
| | KNLSDAILLSDILRVNTEITKAPLSASMIKRYDEHHQDL | |
| | TLLKALVRQQLPEKYKEIFFDQSKNGYAGYIDGGASQE | |
| | EFYKFIKPILEKMDGTEELLVKLNREDLLRKQRTFDNG | |
| | SIPHQIHLGELHAILRRQEDFYPFLKDNREKIEKILTFRIP | |
| | YYVGPLARGNSRFAWMTRKSEETITPWNFEEVVDKGA | |
| | SAQSFIERMTNFDKNLPNEKVLPKHSLLYEYFTVYNEL | |
| | TKVKYVTEGMRKPAFLSGEQKKAIVDLLFKTNRKVTV | |
| | KQLKEDYFKKIECFDSVETSGVEDRFNASLGTYHDLLKI | |
| | IKDKDFLDNEENEDILEDIVLTLTLFEDREMIEERLKTY | |
| | AHLFDDKVMKQLKRRRYTGWGRLSRKLINGIRDKQSG | |
| | KTILDFLKSDGFANRNFMQLIHDDSLTFKEDIQKAQVS | |
| | GQGDSLHEHIANLAGSPAIKKGILQTVKVVDELVKVM | |
| | GRHKPENIVIEMARENQTTQKGQKNSRERMKRIEEGIK | |
| | ELGSQILKEHPVENTQLQNEKLYLYYLQNGRDMYVDQ | |
| | ELDINRLSDYDVDHIVPQSFLKDDSIDNKVLTRSDKNR | |
| | GKSDNVPSEEVVKKMKNYWRQLLNAKLITQRKFDNL | |
| | TKAERGGLSELDKAGFIKRQLVETRQITKHVAQILDSR | |
| | MNTKYDENDKLIREVKVITLKSKLVSDFRKDFQFYKV | |
| | REINNYHHAHDAYLNAVVGTALIKKYPKLESEFVYGD | |
| | YKVYDVRKMIAKSEQEIGKATAKYFFYSNIMNFFKTEI | |
| | TLANGEIRKRPLIETNGETGEIVWDKGRDFATVRKVLS | |
| | MPQVNIVKKTEVQTGGFSKESILPKRNSDKLIARKKDW | |
| | DPKKYGGFDSPTVAYSVLVVAKVEKGKSKKLKSVKEL | |
| | LGITIMERSSFEKNPIDFLEAKGYKEVKKDLIIKLPKYSL | |
| | FELENGRKRMLASAGELQKGNELALPSKYVNFLYLAS | |
| | HYEKLKGSPEDNEQKQLFVEQHKHYLDEIIEQISEFSKR | |
| | VILADANLDKVLSAYNKHRD | |

[0179] The Cas9 circular permutants that may be useful in the genome editing system described herein. Exemplary C-terminal fragments of Cas9, based on the Cas9 of SEQ ID NO: 11, which may be rearranged to an N-terminus of Cas9, are provided below. It should be appreciated that such C-terminal fragments of Cas9 are exemplary and are not meant to be limiting. These exemplary CP-Cas9 fragments have the following sequences:

| CP name | Sequence | SEQ ID NO: |
|---|---|---|
| CP1012 C- | DYKVYDVRKMIAKSEQEIGKATAKYFFYSNIMNFFKT | SEQ ID NO: |
| terminal | EITLANGEIRKRPLIETNGETGEIVWDKGRDFATVRKVL | 72 |
| fragment | SMPQVNIVKKTEVQTGGFSKESILPKRNSDKLIARKKD | |
| | WDPKKYGGFDSPTVAYSVLVVAKVEKGKSKKLKSVK | |
| | ELLGITIMERSSFEKNPlDFLEAKGYKEVKKDLIIKLPKY | |
| | SLFELENGRKRMLASAGELQKGNELALPSKYVNFLYL | |
| | ASHYEKLKGSPEDNEQKQLFVEQHKHYLDEIIEQISEFS | |
| | KRVILADANLDKVLSAYNKHRDKPIREQAENIIHLFTLT | |
| | NLGAPAAFKYFDTTIDRKRYTSTKEVLDATLIHQSITGL | |
| | YETRIDLSQLGGD | |
| CP1028 C- | EIGKATAKYFFYSNIMNFFKTEITLANGEIRKRPLIETNG | SEQ ID NO: |
| terminal | ETGEIVWDKGRDFATVRKVLSMPQVNIVKKTEVQTGG | 73 |
| fragment | FSKESILPKRNSDKLIARKKDWDPKKYGGFDSPTVAYS | |
| | VLVVAKVEKGKSKKLKSVKELLGITIMERSSFEKNPIDF | |
| | LEAKGYKEVKKDLIIKLPKYSLFELENGRKRMLASAGE | |
| | LQKGNELALPSKYVNFLYLASHYEKLKGSPEDNEQKQ | |
| | LFVEQHKHYLDEIIEQISEFSKRVILADANLDKVLSAYN | |
| | KHRDKPIREQAENIIHLFTLTNLGAPAAFKYFDTTIDRK | |
| | RYTSTKEVLDATLIHQSITGLYETRIDLSQLGGD | |
| CP1041 C- | NIMNFFKTEITLANGEIRKRPLIETNGETGEIVWDKGRD | SEQ ID NO: |
| terminal | FATVRKVLSMPQVNIVKKTEVQTGGFSKESILPKRNSD | 74 |
| fragment | KLIARKKDWDPKKYGGFDSPTVAYSVLVVAKVEKGK | |
| | SKKLKSVKELLGITIMERSSFEKNPlDFLEAKGYKEVKK | |
| | DLIIKLPKYSLFELENGRKRMLASAGELQKGNELALPS | |
| | KYVNFLYLASHYEKLKGSPEDNEQKQLFVEQHKHYLD | |
| | EIIEQISEFSKRVILADANLDKVLSAYNKHRDKPIREQA | |
| | ENIIHLFTLTNLGAPAAFKYFDTTIDRKRYTSTKEVLDA | |
| | TLIHQSITGLYETRIDLSQLGGD | |
| CP1249 C- | PEDNEQKQLFVEQHKHYLDEIIEQISEFSKRVILADANL | SEQ ID NO: |
| terminal | DKVLSAYNKHRDKPIREQAENIIHLFTLTNLGAPAAFK | 75 |
| fragment | YFDTTIDRKRYTSTKEVLDATLIHQSITGLYETRIDLSQL | |
| | GGD | |
| CP1300 C- | KPlREQAENIIHLFTLTNLGAPAAFKYFDTTIDRKRYTST | SEQ ID NO: |
| terminal | KEVLDATLIHQSITGLYETRIDLSQLGGD | 76 |
| fragment | | |

I. Cas9 Variants with Modified PAM Specificities

[0180] The genome editing system of the present disclosure may also comprise Cas9 variants with modified PAM specificities. Some aspects of this disclosure provide Cas9 proteins that exhibit activity on a target sequence that does not comprise the canonical PAM (5′-NGG-3′, where N is A, C, G, or T) at its 3′-end. In some embodiments, the Cas9 protein exhibits activity on a target sequence comprising a 5′-NGG-3′ PAM sequence at its 3′-end. In some embodiments, the Cas9 protein exhibits activity on a target sequence comprising a 5′-NNG-3′ PAM sequence at its 3′-end. In some embodiments, the Cas9 protein exhibits activity on a target sequence comprising a 5′-NNA-3′ PAM sequence at its 3′-end. In some embodiments, the Cas9 protein exhibits activity on a target sequence comprising a 5′-NNC-3′ PAM sequence at its 3′-end. In some embodiments, the Cas9 protein exhibits activity on a target sequence comprising a 5′-NNT-3′ PAM sequence at its 3′-end. In some embodiments, the Cas9 protein exhibits activity on a target sequence comprising a 5′-NGT-3′ PAM sequence at its 3′-end. In some embodiments, the Cas9 protein exhibits activity on a target sequence comprising a 5′-NGA-3′ PAM sequence at its 3′-end. In some embodiments, the Cas9 protein exhibits activity on a target sequence comprising a 5′-NGC-3′ PAM sequence at its 3′-end. In some embodiments, the Cas9 protein exhibits activity on a target sequence comprising a 5′-NAA-3′ PAM sequence at its 3′-end. In some embodiments, the Cas9 protein exhibits activity on a target sequence comprising a 5′-NAC-3′ PAM sequence at its 3′-end. In some embodiments, the Cas9 protein exhibits activity on a target sequence comprising a 5′-NAT-3′ PAM sequence at its 3′-end. In still other embodiments, the Cas9 protein exhibits activity on a target sequence comprising a 5′-NAG-3′ PAM sequence at its 3′-end.

[0181] It should be appreciated that any of the amino acid mutations described herein, (e.g., A262T) from a first amino acid residue (e.g., A) to a second amino acid residue (e.g., T) may also include mutations from the first amino acid residue to an amino acid residue that is similar to (e.g., conserved) the second amino acid residue. For example, mutation of an amino acid with a hydrophobic side chain (e.g., alanine, valine, isoleucine, leucine, methionine, phenylalanine, tyrosine, or tryptophan) may be a mutation to a second amino acid with a different hydrophobic side chain (e.g., alanine, valine, isoleucine, leucine, methionine, phenylalanine, tyrosine, or tryptophan). For example, a mutation of an alanine to a threonine (e.g., a A262T mutation) may also be a mutation from an alanine to an amino acid that is similar in size and chemical properties to a threonine, for example, serine. As another example, mutation of an amino acid with a positively charged side chain (e.g., arginine, histidine, or lysine) may be a mutation to a second amino acid with a different positively charged side chain (e.g., arginine, histidine, or lysine). As another example, mutation of an amino acid with a polar side chain (e.g., serine, threonine, asparagine, or glutamine) may be a mutation to a second amino acid with a different polar side chain (e.g., serine, threonine, asparagine, or glutamine). Additional similar amino acid pairs include, but are not limited to, the following: phenylalanine and tyrosine; asparagine and glutamine; methionine and cysteine; aspartic acid and glutamic acid; and arginine and lysine. The skilled artisan would recognize that such conservative amino acid substitutions will likely have minor effects on protein structure and are likely to be well tolerated without compromising function. In some embodiments, any amino of the amino acid mutations provided herein from one amino acid to a threonine may be an amino acid mutation to a serine. In some embodiments, any amino of the amino acid mutations provided herein from one amino acid to an arginine may be an amino acid mutation to a lysine. In some embodiments, any amino of the amino acid mutations provided herein from one amino acid to an isoleucine, may be an amino acid mutation to an alanine, valine, methionine, or leucine. In some embodiments, any amino of the amino acid mutations provided herein from one amino acid to a lysine may be an amino acid mutation to an arginine. In some embodiments, any amino of the amino acid mutations provided herein from one amino acid to an aspartic acid may be an amino acid mutation to a glutamic acid or asparagine. In some embodiments, any amino of the amino acid mutations provided herein from one amino acid to a valine may be an amino acid mutation to an alanine, isoleucine, methionine, or leucine. In some embodiments, any amino of the amino acid mutations provided herein from one amino acid to a glycine may be an amino acid mutation to an alanine. It should be appreciated, however, that additional conserved amino acid residues would be recognized by the skilled artisan and any of the amino acid mutations to other conserved amino acid residues are also within the scope of this disclosure.

[0182] In some embodiments, the Cas9 protein comprises a combination of mutations that exhibit activity on a target sequence comprising a 5′-NAA-3′ PAM sequence at its 3′-end. In some embodiments, the combination of mutations are present in any one of the clones listed in Table 1. In some embodiments, the combination of mutations are conservative mutations of the clones listed in Table 1. In some embodiments, the Cas9 protein comprises the combination of mutations of any one of the Cas9 clones listed in Table 1.

TABLE 1
NAA PAM Clones
Mutations from wild-type SpCas9 (e.g., SEQ ID NO: 11)

D177N, K218R, D614N, D1135N, P11375, E1219V, A1320V, A1323D, R1333K
D177N, K218R, D614N, D1135N, E1219V, Q1221H, H1264Y, A1320V, R1333K
A10T, I322V, S409I, E427G, G715C, D1135N, E1219V, Q1221H, H1264Y, A1320V,
R1333K
A367T, K710E, R1114G, D1135N, P1137S, E1219V, Q1221H, H1264Y, A1320V,
R1333K
A10T, I322V, S409I, E427G, R753G, D861N, D1135N, K1188R, E1219V,
Q1221H, H1264H, A1320V, R1333K
A10T, I322V, S409I, E427G, R654L, V743I, R753G, M1021T, D1135N, D1180G,
K1211R, E1219V, Q1221H, H1264Y, A1320V, R1333K
A10T, I322V, S409I, E427G, V743I, R753G, E762G, D1135N, D1180G, K1211R,
E1219V, Q1221H, H1264Y, A1320V, R1333K
A10T, I322V, S409I, E427G, R753G, D1135N, D1180G, K1211R, E1219V, Q1221H,
H1264Y, S1274R, A1320V, R1333K
A10T, I322V, S409I, E427G, A589S, R753G, D1135N, E1219V, Q1221H, H1264H,
A1320V, R1333K
A10T, I322V, S409I, E427G, R753G, E757K, G865G, D1135N, E1219V, Q1221H,
H1264Y, A1320V, R1333K
A10T, I322V, S409I, E427G, R654L, R753G, E757K, D1135N, E1219V, Q1221H,
H1264Y, A1320V, R1333K
A10T, I322V, S409I, E427G, K599R, M631A, R654L, K673E, V743I, R753G, N758H,
E762G, D1135N, D1180G, E1219V, Q1221H, Q1256R, H1264Y, A1320V, A1323D,
R1333K
A10T, I322V, S409I, E427G, R654L, K673E, V743I, R753G, E762G, N8695, N1054D,
R1114G, D1135N, D1180G, E1219V, Q1221H, H1264Y, A1320V, A1323D, R1333K
A10T, I322V, S409I, E427G, R654L, L727I, V743I, R753G, E762G, R859S, N946D,
F1134L, D1135N, D1180G, E1219V, Q1221H, H1264Y, N1317T, A1320V, A1323D,
R1333K
A10T, I322V, S409I, E427G, R654L, K673E, V743I, R753G, E762G, N803S, N869S,
Y1016D, G1077D, R1114G, F1134L, D1135N, D1180G, E1219V, Q1221H, H1264Y,
V1290G, L1318S, A1320V, A1323D, R1333K
A10T, I322V, S409I, E427G, R654L, K673E, V743I, R753G, E762G, N803S, N869S,
Y1016D, G1077D, R1114G, F1134L, D1135N, K1151E, D1180G, E1219V, Q1221H,
H1264Y, V1290G, L1318S, A1320V, R1333K
A10T, I322V, S409I, E427G, R654L, K673E, V743I, R753G, E762G, N803S, N869S,
Y1016D, G1077D, R1114G, F1134L, D1135N, D1180G, E1219V, Q1221H, H1264Y,
V1290G, L1318S, A1320V, A1323D, R1333K
A10T, I322V, S409I, E427G, R654L, K673E, F693L, V743I, R753G, E762G, N803S,
N869S, L921P, Y1016D, G1077D, F1080S, R1114G, D1135N, D1180G, E1219V,
Q1221H, H1264Y, L1318S, A1320V, A1323D, R1333K
A10T, I322V, S409I, E427G, E630K, R654L, K673E, V743I, R753G, E762G, Q768H,
N803S, N869S, Y1016D, G1077D, R1114G, F1134L, D1135N, D1180G, E1219V,
Q1221H, H1264Y, L1318S, A1320V, R1333K
A10T, I322V, S409I, E427G, R654L, K673E, F693L, V743I, R753G, E762G, Q768H,
N803S, N869S, Y1016D, G1077D, R1114G, F1134L, D1135N, D1180G, E1219V,
Q1221H, G1223S, H1264Y, L1318S, A1320V, R1333K
A10T, I322V, S409I, E427G, R654L, K673E, F693L, V743I, R753G, E762G, N803S,
N869S, L921P, Y1016D, G1077D, F1801S, R1114G, D1135N, D1180G, E1219V,
Q1221H, H1264Y, L1318S, A1320V, A1323D, R1333K
A10T, I322V, S409I, E427G, R654L, V743I, R753G, M1021T, D1135N, D1180G,
K1211R, E1219V, Q1221H, H1264Y, A1320V, R1333K
A10T, I322V, S409I, E427G, R654L, K673E, V743I, R753G, E762G, M673I, N803S,
N869S, G1077D, R1114G, D1135N, V1139A, D1180G, E1219V, Q1221H, A1320V,
R1333K
A10T, I322V, S409I, E427G, R654L, K673E, V743I, R753G, E762G, N803S, N869S,
R1114G, D1135N, E1219V, Q1221H, A1320V, R1333K

[0183] In some embodiments, the as protein comprises an amino acid sequence that is at least 80% identical to the amino acid sequence of a Cas9 protein as provided by any one of the variants of Table 1. In some embodiments, the Cas9 protein comprises an amino acid sequence that is at least 85%, at least 90%, at least 92%, at least 95%, at least 96%, at least 97%, at least 98%, at least 99%, or at least 99.5% identical to the amino acid sequence of a Cas9 protein as provided by any one of the variants of Table 1.

[0184] In some embodiments, the Cas9 protein exhibits an increased activity on a target sequence that does not comprise the canonical PAM (5′-NGG-3′) at its 3′ end as compared to Streptococcus pyogenes Cas9 as provided by SEQ ID NO: 11. In some embodiments, the Cas9 protein exhibits an activity on a target sequence having a 3′ end that is not directly adjacent to the canonical PAM sequence (5′-NGG-3′) that is at least 5-fold increased as compared to the activity of Streptococcus pyogenes Cas9 as provided by SEQ ID NO: 18 on the same target sequence. In some embodiments, the Cas9 protein exhibits an activity on a target sequence that is not directly adjacent to the canonical PAM sequence (5′-NGG-3′) that is at least 10-fold, at least 50-fold, at least 100-fold, at least 500-fold, at least 1,000-fold, at least 5,000-fold, at least 10,000-fold, at least 50,000-fold, at least 100,000-fold, at least 500,000-fold, or at least 1,000,000-fold increased as compared to the activity of Streptococcus pyogenes as provided by SEQ ID NO: 11 on the same target sequence. In some embodiments, the 3′ end of the target sequence is directly adjacent to an AAA, GAA, CAA, or TAA sequence. In some embodiments, the Cas9 protein comprises a combination of mutations that exhibit activity on a target sequence comprising a 5′-NAC-3′ PAM sequence at its 3′-end. In some embodiments, the combination of mutations are present in any one of the clones listed in Table 2. In some embodiments, the combination of mutations are conservative mutations of the clones listed in Table 2. In some embodiments, the Cas9 protein comprises the combination of mutations of any one of the Cas9 clones listed in Table 2.

TABLE 2
NAC PAM Clones
MUTATIONS FROM WILD-TYPE SPCAS9 (E.G., SEQ ID NO: 11)

T472I, R753G, K890E, D1332N, R1335Q, T1337N
I1057S, D1135N, P1301S, R1335Q, T1337N
T472I, R753G, D1332N, R1335Q, T1337N
D1135N, E1219V, D1332N, R1335Q, T1337N
T472I, R753G, K890E, D1332N, R1335Q, T1337N
I1057S, D1135N, P1301S, R1335Q, T1337N
T472I, R753G, D1332N, R1335Q, T1337N
T472I, R753G, Q771H, D1332N, R1335Q, T1337N
E627K, T638P, K652T, R753G, N803S, K959N, R1114G, D1135N, E1219V, D1332N,
R1335Q, T1337N
E627K, T638P, K652T, R753G, N803S, K959N, R1114G, D1135N, K1156E, E1219V,
D1332N, R1335Q, T1337N
E627K, T638P, V647I, R753G, N803S, K959N, G1030R, I1055E, R1114G, D1135N,
E1219V, D1332N, R1335Q, T1337N
E627K, E630G, T638P, V647A, G687R, N767D, N803S, K959N, R1114G, D1135N,
E1219V, D1332G, R1335Q, T1337N
E627K, T638P, R753G, N8035, K959N, R1114G, D1135N, E1219V, N1266H, D1332N,
R1335Q, T1337N
E627K, T638P, R753G, N803S, K959N, I1057T, R1114G, D1135N, E1219V, D1332N,
R1335Q, T1337N
E627K, T638P, R753G, N803S, K959N, R1114G, D1135N, E1219V, D1332N, R1335Q,
T1337N
E627K, M631I, T638P, R753G, N803S, K959N, Y1036H, R1114G, D1135N, E1219V,
D1251G, D1332G, R1335Q, T1337N
E627K, T638P, R753G, N803S, V875I, K959N, Y1016C, R1114G, D1135N, E1219V,
D1251G, D1332G, R1335Q, T1337N, I1348V
K608R, E627K, T638P, V647I, R654L, R753G, N803S, T804A, K848N, V922A, K959N,
R1114G, D1135N, E1219V, D1332N, R1335Q, T1337N
K608R, E627K, T638P, V647I, R753G, N803S, V922A, K959N, K1014N, V1015A,
R1114G, D1135N, K1156N, E1219V, N1252D, D1332N, R1335Q, T1337N
K608R, E627K, R629G, T638P, V647I, A711T, R753G, K775R, K789E, N803D, K959N,
V1015A, Y1036H, R1114G, D1135N, E1219V, N1286H, D1332N, R1335Q, T1337N
K608R, E627K, T638P, V647I, T740A, R753G, N803S, K948E, K959N, Y1016S,
R1114G, D1135N, E1219V, N1286H, D1332N, R1335Q, T1337N
K608R, E627K, T638P, V647I, T740A, N803S, K948E, K959N, Y1016S, R1114G,
D1135N, E1219V, N1286H, D1332N, R1335Q, T1337N
I670S, K608R, E627K, E630G, T638P, V647I, R653K, R753G, I795L, K797N, N803S,
K866R, K890N, K959N, Y1016C, R1114G, D1135N, E1219V, D1332N, R1335Q, T1337N
K608R, E627K, T638P, V647I, T740A, G752R, R753G, K797N, N803S, K948E, K959N,
V1015A, Y1016S, R1114G, D1135N, E1219V, N1266H, D1332N, R1335Q, T1337N
I570T, A589V, K608R, E627K, T638P, V647I, R654L, Q716R, R753G, N803S, K948E,
K959N, Y1016S, R1114G, D1135N, E1207G, E1219V, N1234D, D1332N, R1335Q,
T1337N
K608R, E627K, R629G, T638P, V647I, R654L, Q740R, R753G, N803S, K959N, N990S,
T995S, V1015A, Y1036D, R1114G, D1135N, E1207G, E1219V, N1234D, N1266H,
D1332N, R1335Q, T1337N
I562F, V565D, I570T, K608R, L625S, E627K, T638P, V647I, R654I, G752R, R753G,
N803S, N808D, K959N, M1021L, R1114G, D1135N, N1177S, N1234D, D1332N,
R1335Q, T1337N
I562F, I570T, K608R, E627K, T638P, V647I, R753G, E790A, N803S, K959N, V1015A,
Y1036H, R1114G, D1135N, D1180E, A1184T, E1219V, D1332N, R1335Q, T1337N
I570T, K608R, E627K, T638P, V647I, R654H, R753G, E790A, N803S, K959N, V1015A,
R1114G, D1127A, D1135N, E1219V, D1332N, R1335Q, T1337N
I570T, K608R, L625S, E627K, T638P, V647I, R654I, T703P, R753G, N803S, N808D,
K959N, M1021L, R1114G, D1135N, E1219V, D1332N, R1335Q, T1337N
I570S, K608R, E627K, E630G, T638P, V647I, R653K, R753G, I795L, N803S, K866R,
K890N, K959N, Y1016C, R1114G, D1135N, E1219V, D1332N, R1335Q, T1337N
I570T, K608R, E627K, T638P, V647I, R654H, R753G, E790A, N803S, K959N, V1016A,
R1114G, D1135N, E1219V, K1246E, D1332N, R1335Q, T1337N
K608R, E627K, T638P, V647I, R654L, K673E, R753G, E790A, N803S, K948E, K959N,
R1114G, D1127G, D1135N, D1180E, E1219V, N1286H, D1332N, R1335Q, T1337N
K608R, L625S, E627K, T638P, V647I, R654I, I670T, R753G, N803S, N808D, K959N,
M1021L, R1114G, D1135N, E1219V, N1286H, D1332N, R1335Q, T1337N
E627K, M631V, T638P, V647I, K710E, R753G, N803S, N808D, K948E, M1021L,
R1114G, D1135N, E1219V, D1332N, R1335Q, T1337N, S1338T, H1349R

[0185] In some embodiments, the as protein comprises an amino acid sequence that is at least 80% identical to the amino acid sequence of a Cas9 protein as provided by any one of the variants of Table 2. In some embodiments, the Cas9 protein comprises an amino acid sequence that is at least 85%, at least 90%, at least 92%, at least 95%, at least 96%, at least 97%, at least 98%, at least 99%, or at least 99.5% identical to the amino acid sequence of a Cas9 protein as provided by any one of the variants of Table 2.

[0186] In some embodiments, the Cas9 protein exhibits an increased activity on a target sequence that does not comprise the canonical PAM (5′-NGG-3′) at its 3′ end as compared to Streptococcus pyogenes Cas9 as provided by SEQ ID NO: 11. In some embodiments, the Cas9 protein exhibits an activity on a target sequence having a 3′ end that is not directly adjacent to the canonical PAM sequence (5′-NGG-3′) that is at least 5-fold increased as compared to the activity of Streptococcus pyogenes Cas9 as provided by SEQ ID NO: 11 on the same target sequence. In some embodiments, the Cas9 protein exhibits an activity on a target sequence that is not directly adjacent to the canonical PAM sequence (5′-NGG-3′) that is at least 10-fold, at least 50-fold, at least 100-fold, at least 500-fold, at least 1,000-fold, at least 5,000-fold, at least 10,000-fold, at least 50,000-fold, at least 100,000-fold, at least 500,000-fold, or at least 1,000,000-fold increased as compared to the activity of Streptococcus pyogenes as provided by SEQ ID NO: 11 on the same target sequence. In some embodiments, the 3′ end of the target sequence is directly adjacent to an AAC, GAC, CAC, or TAC sequence.

[0187] In some embodiments, the Cas9 protein comprises a combination of mutations that exhibit activity on a target sequence comprising a 5′-NAT-3′ PAM sequence at its 3′-end. In some embodiments, the combination of mutations are present in any one of the clones listed in Table 3. In some embodiments, the combination of mutations are conservative mutations of the clones listed in Table 3. In some embodiments, the Cas9 protein comprises the combination of mutations of any one of the Cas9 clones listed in Table 3.

TABLE 3
NAT PAM Clones
MUTATIONS FROM WILD-TYPE SPCAS9 (E.G., SEQ ID NO: 11)

K961E, H985Y, D1135N, K1191N, E1219V, Q1221H, A1320A, P1321S, R1335L
D1135N, G1218S, E1219V, Q1221H, P1249S, P1321S, D1322G, R1335L
V743I, R753G, E790A, D1135N, G1218D, E1219V, Q1221H, A1227V, P1249S, N1286K,
A1293T, P1321S, D1322G, R1335L, T1339I
F575S, M631L, R654L, V748I, V743I, R753G, D853E, V922A, R1114G D1135N, G1218S,
E1219V, Q1221H, A1227V, P1249S, N1286K, A1293T, P1321S, D1322G, R1335L, T1339I
F575S, M631L, R654L, R664K, R753G, D853E, V922A, R1114G D1135N, D1180G,
G1218S, E1219V, Q1221H, P1249S, N1286K, P1321S, D1322G, R1335L
M631L, R654L, R753G, K797E, D853E, V922A, D1012A, R1114G D1135N, G1218S,
E1219V, Q1221H, P1249S, N1317K, P1321S, D1322G, R1335L
F575S, M631L, R654L, R664K, R753G, D853E, V922A, R1114G, Y1131C, D1135N,
D1180G, G1218S, E1219V, Q1221H, P1249S, P1321S, D1322G, R1335L
F575S, M631L, R654L, R664K, R753G, D853E, V922A, R1114G, Y1131C, D1135N,
D1180G, G1218S, E1219V, Q1221H, P1249S, P1321S, D1322G, R1335L
F575S, D596Y, M631L, R654L, R664K, R753G, D853E V922A, R1114G, Y1131C,
D1135N, D1180G, G1218S, E1219V, Q1221H, P1249S, Q1256R, P1321S, D1322G,
R1335L
F575S, M631L, R654L, R664K, K710E, V750A, R753G, D853E, V922A, R1114G,
Y1131C, D1135N, D1180G, G1218S, E1219V, Q1221H, P1249S, P1321S, D1322G,
R1335L
F575S, M631L, K649R, R654L, R664K, R753G, D853E, V922A, R1114G, Y1131C,
D1135N, K1156E, D1180G, G1218S, E1219V, Q1221H, P1249S, P1321S, D1322G,
R1335L
F575S, M631L, R654L, R664K, R753G, D853E, V922A, R1114G, Y1131C, D1135N,
D1180G, G1218S, E1219V, Q1221H, P1249S, P1321S, D1322G, R1335L
F575S, M631L, R654L, R664K, R753G, D853E, V922A, I1057G, R1114G, Y1131C,
D1135N, D1180G, G1218S, E1219V, Q1221H, P1249S, N1308D, P1321S, D1322G,
R1335L
M631L, R654L, R753G, D853E, V922A, R1114G, Y1131C, D1135N, E1150V, D1180G,
G1218S, E1219V, Q1221H, P1249S, P1321S, D1332G, R1335L
M631L, R654L, R664K, R753G, D853E, I1057V, Y1131C, D1135N, D1180G, G1218S,
E1219V, Q1221H, P1249S, P1321S, D1332G, R1335L
M631L, R654L, R664K, R753G, I1057V, R1114G, Y1131C, D1135N, D1180G, G1218S,
E1219V, Q1221H, P1249S, P1321S, D1332G, R1335L

[0188] The above description of various napDNAbps which can be used in connection with the presently disclose genome editing system is not meant to be limiting in any way. The genome editing system may comprise the canonical SpCas9, or any ortholog Cas9 protein, or any variant Cas9 protein—including any naturally occurring variant, mutant, or otherwise engineered version of Cas9—that is known or which can be made or evolved through a directed evolutionary or otherwise mutagenic process. In various embodiments, the Cas9 or Cas9 variants have a nickase activity, i.e., only cleave of strand of the target DNA sequence. In other embodiments, the Cas9 or Cas9 variants have inactive nucleases, i.e., are “dead” Cas9 proteins. Other variant Cas9 proteins that may be used are those having a smaller molecular weight than the canonical SpCas9 (e.g., for easier delivery) or having modified or rearranged primary amino acid structure (e.g., the circular permutant formats). The genome editing system described herein may also comprise Cas9 equivalents, including Cas12a/Cpf1 and Cas12b proteins which are the result of convergent evolution. The napDNAbps used herein (e.g., SpCas9, Cas9 variant, or Cas9 equivalents) may also may also contain various modifications that alter/enhance their PAM specifities. Lastly, the application contemplates any Cas9, Cas9 variant, or Cas9 equivalent which has at least 70%, at least 75%, at least 80%, at least 85%, at least 90%, at least 91%, at least 92%, at least 93%, at least 94%, at least 95%, at least 96%, at least 97%, at least 98%, at least 99%, or at least 99.9% sequence identity to a reference Cas9 sequence, such as a references SpCas9 canonical sequences or a reference Cas9 equivalent (e.g., Cas12a/Cpf1).

[0189] In a particular embodiment, the Cas9 variant having expanded PAM capabilities is SpCas9 (H840A) VRQR (SEQ ID NO: 77), which has the following amino acid sequence (with the V, R, Q, R substitutions relative to the SpCas9 (H840A) of SEQ ID NO: 77 being show in bold underline. In addition, the methionine residue in SpCas9 (H840) was removed for SpCas9 (H840A) VRQR):

(SEQ ID NO: 77)
DKKYSIGLDIGTNSVGWAVITDEYKVPSKKFKVLGNTDRHSIKKNLIGALL
FDSGETAEATRLKRTARRRYTRRKNRICYLQEIFSNEMAKVDDSFFHRLEE
SFLVEEDKKHERHPIFGNIVDEVAYHEKYPTIYHLRKKLVDSTDKADLRLI
YLALAHMIKFRGHFLIEGDLNPDNSDVDKLFIQLVQTYNQLFEENPINASG
VDAKAILSARLSKSRRLENLIAQLPGEKKNGLFGNLIALSLGLTPNFKSNF
DLAEDAKLQLSKDTYDDDLDNLLAQIGDQYADLFLAAKNLSDAILLSDILR
VNTEITKAPLSASMIKRYDEHHQDLTLLKALVRQQLPEKYKEIFFDQSKNG
YAGYIDGGASQEEFYKFIKPILEKMDGTEELLVKLNREDLLRKQRTFDNGS
IPHQIHLGELHAILRRQEDFYPFLKDNREKIEKILTFRIPYYVGPLARGNS
RFAWMTRKSEETITPWNFEEVVDKGASAQSFIERMTNFDKNLPNEKVLPKH
SLLYEYFTVYNELTKVKYVTEGMRKPAFLSGEQKKAIVDLLFKTNRKVTVK
QLKEDYFKKIECFDSVEISGVEDRFNASLGTYHDLLKIIKDKDFLDNEENE
DILEDIVLTLTLFEDREMIEERLKTYAHLFDDKVMKQLKRRRYTGWGRLSR
KLINGIRDKQSGKTILDFLKSDGFANRNFMQLIHDDSLTFKEDIQKAQVSG
QGDSLHEHIANLAGSPAIKKGILQTVKVVDELVKVMGRHKPENIVIEMARE
NQTTQKGQKNSRERMKRIEEGIKELGSQILKEHPVENTQLQNEKLYLYYLQ
NGRDMYVDQELDINRLSDYDVDAIVPQSFLKDDSIDNKVLTRSDKNRGKSD
NVPSEEVVKKMKNYWRQLLNAKLITQRKFDNLTKAERGGLSELDKAGFIKR
QLVETRQITKHVAQILDSRMNTKYDENDKLIREVKVITLKSKLVSDFRKDF
QFYKVREINNYHHAHDAYLNAVVGTALIKKYPKLESEFVYGDYKVYDVRKM
IAKSEQEIGKATAKYFFYSNIMNFFKTEITLANGEIRKRPLIETNGETGEI
VWDKGRDFATVRKVLSMPQVNIVKKTEVQTGGFSKESILPKRNSDKLIARK
KDWDPKKYGGFVSPTVAYSVLVVAKVEKGKSKKLKSVKELLGITIMERSSF
EKNPIDFLEAKGYKEVKKDLIIKLPKYSLFELENGRKRMLASARELQKGNE
LALPSKYVNFLYLASHYEKLKGSPEDNEQKQLFVEQHKHYLDEIIEQISEF
SKRVILADANLDKVLSAYNKHRDKPIREQAENIIHLFTLTNLGAPAAFKYF
DTTIDRKQYRSTKEVLDATLIHQSITGLYETRIDLSQLGGD

[0190] In another particular embodiment, the as variant having expanded capabilities is SpCas9 (H840A) VRER, which has the following amino acid sequence (with the V, R, E, R substitutions relative to the SpCas9 (H840A) of SEQ ID NO: 78 being shown in bold underline. In addition, the methionine residue in SpCas9 (H840) was removed for SpCas9 (H840A) VRER):

(SEQ ID NO: 78)
DKKYSIGLDIGTNSVGWAVITDEYKVPSKKFKVLGNTDRHSIKKNLIGALL
FDSGETAEATRLKRTARRRYTRRKNRICYLQEIFSNEMAKVDDSFFHRLEE
SFLVEEDKKHERHPIFGNIVDEVAYHEKYPTIYHLRKKLVDSTDKADLRLI
YLALAHMIKFRGHFLIEGDLNPDNSDVDKLFIQLVQTYNQLFEENPINASG
VDAKAILSARLSKSRRLENLIAQLPGEKKNGLFGNLIALSLGLTPNFKSNF
DLAEDAKLQLSKDTYDDDLDNLLAQIGDQYADLFLAAKNLSDAILLSDILR
VNTEITKAPLSASMIKRYDEHHQDLTLLKALVRQQLPEKYKEIFFDQSKNG
YAGYIDGGASQEEFYKFIKPILEKMDGTEELLVKLNREDLLRKQRTFDNGS
IPHQIHLGELHAILRRQEDFYPFLKDNREKIEKILTFRIPYYVGPLARGNS
RFAWMTRKSEETITPWNFEEVVDKGASAQSFIERMTNFDKNLPNEKVLPKH
SLLYEYFTVYNELTKVKYVTEGMRKPAFLSGEQKKAIVDLLFKTNRKVTVK
QLKEDYFKKIECFDSVEISGVEDRFNASLGTYHDLLKIIKDKDFLDNEENE
DILEDIVLTLTLFEDREMIEERLKTYAHLFDDKVMKQLKRRRYTGWGRLSR
KLINGIRDKQSGKTILDFLKSDGFANRNFMQLIHDDSLTFKEDIQKAQVSG
QGDSLHEHIANLAGSPAIKKGILQTVKVVDELVKVMGRHKPENIVIEMARE
NQTTQKGQKNSRERMKRIEEGIKELGSQILKEHPVENTQLQNEKLYLYYLQ
NGRDMYVDQELDINRLSDYDVDAIVPQSFLKDDSIDNKVLTRSDKNRGKSD
NVPSEEVVKKMKNYWRQLLNAKLITQRKFDNLTKAERGGLSELDKAGFIKR
QLVETRQITKHVAQILDSRMNTKYDENDKLIREVKVITLKSKLVSDFRKDF
QFYKVREINNYHHAHDAYLNAVVGTALIKKYPKLESEFVYGDYKVYDVRKM
IAKSEQEIGKATAKYFFYSNIMNFFKTEITLANGEIRKRPLIETNGETGEI
VWDKGRDFATVRKVLSMPQVNIVKKTEVQTGGFSKESILPKRNSDKLIARK
KDWDPKKYGGFVSPTVAYSVLVVAKVEKGKSKKLKSVKELLGITIMERSSF
EKNPIDFLEAKGYKEVKKDLIIKLPKYSLFELENGRKRMLASARELQKGNE
LALPSKYVNFLYLASHYEKLKGSPEDNEQKQLFVEQHKHYLDEIIEQISEF
SKRVILADANLDKVLSAYNKHRDKPIREQAENIIHLFTLTNLGAPAAFKYF
DTTIDRKEYRSTKEVLDATLIHQSITGLYETRIDLSQLGGD

[0191] In some embodiments, the napDNAbp that functions with a non-canonical PAM sequence is an Argonaute protein. One example of such a nucleic acid programmable DNA binding protein is an Argonaute protein from Natronobacterium gregoryi (NgAgo). NgAgo is a ssDNA-guided endonuclease. NgAgo binds 5′ phosphorylated ssDNA of ˜24 nucleotides (gDNA) to guide it to its target site and will make DNA double-strand breaks at the gDNA site. In contrast to Cas9, the NgAgo-gDNA system does not require a protospacer-adjacent motif (PAM). Using a nuclease inactive NgAgo (dNgAgo) can greatly expand the bases that may be targeted. The characterization and use of NgAgo have been described in Gao et al., Nat Biotechnol., 2016 July; 34(7):768-73. PubMed PMID: 27136078; Swarts et al., Nature. 507(7491) (2014):258-61; and Swarts et al., Nucleic Acids Res. 43(10) (2015):5120-9, each of which is incorporated herein by reference.

[0192] In some embodiments, the napDNAbp is a prokaryotic homolog of an Argonaute protein. Prokaryotic homologs of Argonaute proteins are known and have been described, for example, in Makarova K., et al., “Prokaryotic homologs of Argonaute proteins are predicted to function as key components of a novel system of defense against mobile genetic elements”, Biol Direct. 2009 Aug. 25; 4:29. doi: 10.1186/1745-6150-4-29, the entire contents of which is hereby incorporated by reference. In some embodiments, the napDNAbp is a Marinitoga piezophila Argunaute (MpAgo) protein. The CRISPR-associated Marinitoga piezophila Argunaute (MpAgo) protein cleaves single-stranded target sequences using 5′-phosphorylated guides. The 5′ guides are used by all known Argonautes. The crystal structure of an MpAgo-RNA complex shows a guide strand binding site comprising residues that block 5′ phosphate interactions. This data suggests the evolution of an Argonaute subclass with noncanonical specificity for a 5′-hydroxylated guide. See, e.g., Kaya et al., “A bacterial Argonaute with noncanonical guide RNA specificity”, Proc Natl Acad Sci USA. 2016 Apr. 12; 113(15):4057-62, the entire contents of which are hereby incorporated by reference). It should be appreciated that other argonaute proteins may be used, and are within the scope of this disclosure.

[0193] Some aspects of the disclosure provide Cas9 domains that have different PAM specificities. Typically, Cas9 proteins, such as Cas9 from S. pyogenes (spCas9), require a canonical NGG PAM sequence to bind a particular nucleic acid region. This may limit the ability to edit desired bases within a genome. In some embodiments, the base editing fusion proteins provided herein may need to be placed at a precise location, for example where a target base is placed within a 4 base region (e.g., a “editing window”), which is approximately 15 bases upstream of the PAM. See Komor, A. C., et al., “Programmable editing of a target base in genomic DNA without double-stranded DNA cleavage” Nature 533, 420-424 (2016), the entire contents of which are hereby incorporated by reference. Accordingly, in some embodiments, any of the fusion proteins provided herein may contain a Cas9 domain that is capable of binding a nucleotide sequence that does not contain a canonical (e.g., NGG) PAM sequence. Cas9 domains that bind to non-canonical PAM sequences have been described in the art and would be apparent to the skilled artisan. For example, Cas9 domains that bind non-canonical PAM sequences have been described in Kleinstiver, B. P., et al., “Engineered CRISPR-Cas9 nucleases with altered PAM specificities” Nature 523, 481-485 (2015); and Kleinstiver, B. P., et al., “Broadening the targeting range of Staphylococcus aureus CRISPR-Cas9 by modifying PAM recognition” Nature Biotechnology 33, 1293-1298 (2015); the entire contents of each are hereby incorporated by reference.

[0194] For example, a napDNAbp domain with altered PAM specificity, such as a domain with at least 80%, at least 85%, at least 90%, at least 95%, or at least 99% sequence identity with wild type Francisella novicida Cpf1 (D917, E1006, and D1255) (SEQ ID NO: 79), which has the following amino acid sequence:

(SEQ ID NO: 79)
MSIYQEFVNKYSLSKTLRFELIPQGKTLENIKARGLILDDEKRAKDYKKA
KQIIDKYHQFFIEEILSSVCISEDLLQNYSDVYFKLKKSDDDNLQKDFKS
AKDTIKKQISEYIKDSEKFKNLFNQNLIDAKKGQESDLILWLKQSKDNGI
ELFKANSDITDIDEALEIIKSFKGWTTYFKGFHENRKNVYSSNDIPTSII
YRIVDDNLPKFLENKAKYESLKDKAPEAINYEQIKKDLAEELTFDIDYKT
SEVNQRVFSLDEVFEIANFNNYLNQSGITKFNTIIGGKFVNGENTKRKGI
NEYINLYSQQINDKTLKKYKMSVLFKQILSDTESKSFVIDKLEDDSDVVT
TMQSFYEQIAAFKTVEEKSIKETLSLLFDDLKAQKLDLSKIYFKNDKSLT
DLSQQVFDDYSVIGTAVLEYITQQIAPKNLDNPSKKEQELIAKKTEKAKY
LSLETIKLALEEFNKHRDIDKQCRFEEILANFAAIPMIFDEIAQNKDNLA
QISIKYQNQGKKDLLQASAEDDVKAIKDLLDQTNNLLHKLKIFHISQSED
KANILDKDEHFYLVFEECYFELANIVPLYNKIRNYITQKPYSDEKFKLNF
ENSTLANGWDKNKEPDNTAILFIKDDKYYLGVMNKKNNKIFDDKAIKENK
GEGYKKIVYKLLPGANKMLPKVFFSAKSIKFYNPSEDILRIRNHSTHTKN
GSPQKGYEKFEFNIEDCRKFIDFYKQSISKHPEWKDFGFRFSDTQRYNSI
DEFYREVENQGYKLTFENISESYIDSVVNQGKLYLFQIYNKDFSAYSKGR
PNLHTLYWKALFDERNLQDVVYKLNGEAELFYRKQSIPKKITHPAKEAIA
NKNKDNPKKESVFEYDLIKDKRFTEDKFFFHCPITINFKSSGANKFNDEI
NLLLKEKANDVHILSIDRGERHLAYYTLVDGKGNIIKQDTFNIIGNDRMK
TNYHDKLAAIEKDRDSARKDWKKINNIKEMKEGYLSQVVHEIAKLVIEYN
AIVVFEDLNFGFKRGRFKVEKQVYQKLEKMLIEKLNYLVFKDNEFDKTGG
VLRAYQLTAPFETFKKMGKQTGIIYYVPAGFTSKICPVTGFVNQLYPKYE
SVSKSQEFFSKFDKICYNLDKGYFEFSFDYKNFGDKAAKGKWTIASFGSR
LINFRNSDKNHNWDTREVYPTKELEKLLKDYSIEYGHGECIKAAICGESD
KKFFAKLTSVLNTILQMRNSKTGTELDYLISPVADVNGNFFDSRQAPKNM
PQDADANGAYHIGLKGLMLLGRIKNNQEGKKLNLVIKNEEYFEFVQNRNN

[0195] An additional napDNAbp domain with altered specificity, such as a domain having at least 80%, at least 85%, at least 90%, at least 95%, or at least 99% sequence identity with wild type Geobacillus thermodenitrificans Cas9 (SEQ ID NO: 80), which has the following amino acid sequence:

(SEQ ID NO: 80)
MKYKIGLDIGITSIGWAVINLDIPRIEDLGVRIFDRAENPKTGESLALPR
RLARSARRRLRRRKHRLERIRRLFVREGILTKEELNKLFEKKHEIDVWQL
RVEALDRKLNNDELARILLHLAKRRGFRSNRKSERTNKENSTMLKHIEEN
QSILSSYRTVAEMVVKDPKFSLHKRNKEDNYTNTVARDDLEREIKLIFAK
QREYGNIVCTEAFEHEYISIWASQRPFASKDDIEKKVGFCTFEPKEKRAP
KATYTFQSFTVWEHINKLRLVSPGGIRALTDDERRLIYKQAFHKNKITFH
DVRTLLNLPDDTRFKGLLYDRNTTLKENEKVRFLELGAYHKIRKAIDSVY
GKGAAKSFRPIDFDTFGYALTMFKDDTDIRSYLRNEYEQNGKRMENLADK
VYDEELIEELLNLSFSKFGHLSLKALRNILPYMEQGEVYSTACERAGYTF
TGPKKKQKTVLLPNIPPIANPVVMRALTQARKVVNAIIKKYGSPVSIHIE
LARELSQSFDERRKMQKEQEGNRKKNETAIRQLVEYGLTLNPTGLDIVKF
KLWSEQNGKCAYSLQPIEIERLLEPGYTEVDHVIPYSRSLDDSYTNKVLV
LTKENREKGNRTPAEYLGLGSERWQQFETFVLTNKQFSKKKRDRLLRLHY
DENEENEFKNRNLNDTRYISRFLANFIREHLKFADSDDKQKVYTVNGRIT
AHLRSRWNFNKNREESNLHHAVDAAIVACTTPSDIARVTAFYQRREQNKE
LSKKTDPQFPQPWPHFADELQARLSKNPKESIKALNLGNYDNEKLESLQP
VFVSRMPKRSITGAAHQETLRRYIGIDERSGKIQTVVKKKLSEIQLDKTG
HFPMYGKESDPRTYEAIRQRLLEHNNDPKKAFQEPLYKPKKNGELGPIIR
TIKIIDTTNQVIPLNDGKTVAYNSNIVRVDVFEKDGKYYCVPIYTIDMMK
GILPNKAIEPNKPYSEWKEMTEDYTFRFSLYPNDLIRIEFPREKTIKTAV
GEEIKIKDLFAYYQTIDSSNGGLSLVSHDNNFSLRSIGSRTLKRFEKYQV
DVLGNIYKVRGEKRVGVASSSHSKAGETIRPL

[0196] In some embodiments, the nucleic acid programmable DNA binding protein (napDNAbp) is a nucleic acid programmable DNA binding protein that does not require a canonical (NGG) PAM sequence. In some embodiments, the napDNAbp is an argonaute protein. One example of such a nucleic acid programmable DNA binding protein is an Argonaute protein from Natronobacterium gregoryi (NgAgo). NgAgo is a ssDNA-guided endonuclease. NgAgo binds 5′ phosphorylated ssDNA of ˜24 nucleotides (gDNA) to guide it to its target site and will make DNA double-strand breaks at the gDNA site. In contrast to Cas9, the NgAgo-gDNA system does not require a protospacer-adjacent motif (PAM). Using a nuclease inactive NgAgo (dNgAgo) can greatly expand the bases that may be targeted. The characterization and use of NgAgo have been described in Gao et al., Nat Biotechnol., 34(7): 768-73 (2016), PubMed PMID: 27136078; Swarts et al., Nature, 507(7491): 258-61 (2014); and Swarts et al., Nucleic Acids Res. 43(10) (2015): 5120-9, each of which is incorporated herein by reference. The sequence of Natronobacterium gregoryi Argonaute is provided in SEQ ID NO: 81.

[0197] The disclosed fusion proteins may comprise a napDNAbp domain having at least 80%, at least 85%, at least 90%, at least 95%, or at least 99% sequence identity with wild type Natronobacterium gregoryi Argonaute (SEQ ID NO: 81), which has the following amino acid sequence:

(SEQ ID NO: 81)
MTVIDLDSTTTADELTSGHTYDISVTLTGVYDNTDEQHPRMSLAFEQDN
GERRYITLWKNTTPKDVFTYDYATGSTYIFTNIDYEVKDGYENLTATYQ
TTVENATAQEVGTTDEDETFAGGEPLDHHLDDALNETPDDAETESDSGH
VMTSFASRDQLPEWTLHTYTLTATDGAKTDTEYARRTLAYTVRQELYTD
HDAAPVATDGLMLLTPEPLGETPLDLDCGVRVEADETRTLDYTTAKDRL
LARELVEEGLKRSLWDDYLVRGIDEVLSKEPVLTCDEFDLHERYDLSVE
VGHSGRAYLHINFRHRFVPKLTLADIDDDNIYPGLRVKTTYRPRRGHIV
WGLRDECATDSLNTLGNQSVVAYHRNNQTPINTDLLDAIEAADRRVVET
RRQGHGDDAVSFPQELLAVEPNTHQIKQFASDGFHQQARSKTRLSASRC
SEKAQAFAERLDPVRLNGSTVEFSSEFFTGNNEQQLRLLYENGESVLTF
RDGARGAHPDETFSKGIVNPPESFEVAVVLPEQQADTCKAQWDTMADLL
NQAGAPPTRSETVQYDAFSSPESISLNVAGAIDPSEVDAAFVVLPPDQE
GFADLASPTETYDELKKALANMGIYSQMAYFDRFRDAKIFYTRNVALGL
LAAAGGVAFTTEHAMPGDADMFIGIDVSRSYPEDGASGQINIAATATAV
YKDGTILGHSSTRPQLGEKLQSTDVRDIMKNAILGYQQVTGESPTHIVI
HRDGFMNEDLDPATEFLNEQGVEYDIVEIRKQPQTRLLAVSDVQYDTPV
KSIAAINQNEPRATVATFGAPEYLATRDGGGLPRPIQIERVAGETDIET
LTRQVYLLSQSHIQVHNSTARLPITTAYADQASTHATKGYLVQTGAFES
NVGFL

[0198] In addition, any available methods may be utilized to obtain or construct a variant or mutant Cas9 protein. The term “mutation,” as used herein, refers to a substitution of a residue within a sequence, e.g., a nucleic acid or amino acid sequence, with another residue, or a deletion or insertion of one or more residues within a sequence. Mutations are typically described herein by identifying the original residue followed by the position of the residue within the sequence and by the identity of the newly substituted residue. Various methods for making the amino acid substitutions (mutations) provided herein are well known in the art, and are provided by, for example, Green and Sambrook, Molecular Cloning: A Laboratory Manual (4th ed., Cold Spring Harbor Laboratory Press, Cold Spring Harbor, N.Y. (2012)). Mutations can include a variety of categories, such as single base polymorphisms, microduplication regions, indel, and inversions, and is not meant to be limiting in any way. Mutations can include “loss-of-function” mutations which is the normal result of a mutation that reduces or abolishes a protein activity. Most loss-of-function mutations are recessive, because in a heterozygote the second chromosome copy carries an unmutated version of the gene coding for a fully functional protein whose presence compensates for the effect of the mutation. Mutations also embrace “gain-of-function” mutations, which is one which confers an abnormal activity on a protein or cell that is otherwise not present in a normal condition. Many gain-of-function mutations are in regulatory sequences rather than in coding regions, and can therefore have a number of consequences. For example, a mutation might lead to one or more genes being expressed in the wrong tissues, these tissues gaining functions that they normally lack. Because of their nature, gain-of-function mutations are usually dominant. Mutations can be introduced into a reference Cas9 protein using site-directed mutagenesis. Older methods of site-directed mutagenesis known in the art rely on sub-cloning of the sequence to be mutated into a vector, such as an M13 bacteriophage vector, that allows the isolation of single-stranded DNA template. In these methods, one anneals a mutagenic primer (i.e., a primer capable of annealing to the site to be mutated but bearing one or more mismatched nucleotides at the site to be mutated) to the single-stranded template and then polymerizes the complement of the template starting from the 3′ end of the mutagenic primer. The resulting duplexes are then transformed into host bacteria and plaques are screened for the desired mutation. More recently, site-directed mutagenesis has employed PCR methodologies, which have the advantage of not requiring a single-stranded template. In addition, methods have been developed that do not require sub-cloning. Several issues must be considered when PCR-based site-directed mutagenesis is performed. First, in these methods it is desirable to reduce the number of PCR cycles to prevent expansion of undesired mutations introduced by the polymerase. Second, a selection must be employed in order to reduce the number of non-mutated parental molecules persisting in the reaction. Third, an extended-length PCR method is preferred in order to allow the use of a single PCR primer set. And fourth, because of the non-template-dependent terminal extension activity of some thermostable polymerases it is often necessary to incorporate an end-polishing step into the procedure prior to blunt-end ligation of the PCR-generated mutant product.

[0199] Mutations may also be introduced by directed evolution processes, such as phage-assisted continuous evolution (PACE) or phage-assisted noncontinuous evolution (PANCE). The term “phage-assisted continuous evolution (PACE),” as used herein, refers to continuous evolution that employs phage as viral vectors. The general concept of PACE technology has been described, for example, in International PCT Application, PCT/US2009/056194, filed Sep. 8, 2009, published as WO 2010/028347 on Mar. 11, 2010; International PCT Application, PCT/US2011/066747, filed Dec. 22, 2011, published as WO 2012/088381 on Jun. 28, 2012; U.S. Application, U.S. Pat. No. 9,023,594, issued May 5, 2015, International PCT Application, PCT/US2015/012022, filed Jan. 20, 2015, published as WO 2015/134121 on Sep. 11, 2015, and International PCT Application, PCT/US2016/027795, filed Apr. 15, 2016, published as WO 2016/168631 on Oct. 20, 2016, the entire contents of each of which are incorporated herein by reference. Variant Cas9s may also be obtain by phage-assisted non-continuous evolution (PANCE),” which as used herein, refers to non-continuous evolution that employs phage as viral vectors. PANCE is a simplified technique for rapid in vivo directed evolution using serial flask transfers of evolving ‘selection phage’ (SP), which contain a gene of interest to be evolved, across fresh E. coli host cells, thereby allowing genes inside the host E. coli to be held constant while genes contained in the SP continuously evolve. Serial flask transfers have long served as a widely-accessible approach for laboratory evolution of microbes, and, more recently, analogous approaches have been developed for bacteriophage evolution. The PANCE system features lower stringency than the PACE system.

[0200] Any of the references noted above which relate to Cas9 or Cas9 equivalents are hereby incorporated by reference in their entireties, if not already stated so.

J. Divided napDNAbp Domains for Split Genome Editor Delivery

[0201] In various embodiments, the genome editing system described herein may be delivered to cells as two or more fragments which become assembled inside the cell (either by passive assembly, or by active assembly, such as using split intein sequences) into a reconstituted genome editor. In some cases, the self assembly may be passive whereby the two or more genome editor fragments associate inside the cell covalently or non-covalently to reconstitute the genome editor. In other cases, the self-assembly may be catalzyed by dimerization domains installed on each of the fragments. Examples of dimerization domains are described herein. In still other cases, the self-assembly may be catalyzed by split intein sequences installed on each of the genome editor fragments.

[0202] Split PE delivery may be advantageous to address various size constraints of different delivery approaches. For example, delivery approaches may include virus-based delivery methods, messenger RNA-based delivery methods, or RNP-based delivery (ribonucleoprotein-based delivery). And, each of these methods of delivery may be more efficient and/or effective by dividing up the genome editor into smaller pieces. Once inside the cell, the smaller pieces can assemble into a functional genome editor. Depending on the means of splitting, the divided genome editor fragments can be reassembled in a non-covalent manner or a covalent manner to reform the genome editor. In one embodiment, the genome editor can be split at one or more split sites into two or more fragments. The fragments can be unmodified (other than being split). Once the fragments are delivered to the cell (e.g., by direct delivery of a ribonucleoprotein complex or by nucleic delivery—e.g., mRNA delivery or virus vector based delivery), the fragments can reassociate covalently or non-covalently to reconstitute the genome editor. In another embodiment, the genome editor can be split at one or more split sites into two or more fragments. Each of the fragments can be modified to comprise a dimerization domain, whereby each fragment that is formed is coupled to a dimerization domain. Once delivered or expressed within a cell, the dimerization domains of the different fragments associate and bind to one another, bringing the different genome editor fragments together to reform a functional genome editor. In yet another embodiment, the genome editor fragment may be modified to comprise a split intein. Once delivered or expressed within a cell, the split intein domains of the different fragments associate and bind to one another, and then undergo trans-splicing, which results in the excision of the split-intein domains from each of the fragments, and a concomitant formation of a peptide bond between the fragments, thereby restoring the genome editor.

[0203] In one embodiment, the genome editor can be delivered using a split-intein approach.

[0204] The location of the split site can be positioned between any one or more pair of residues in the genome editor and in any domains therein, including within the napDNAbp domain, the polymerase domain (e.g., RT domain), linker domain that joins the napDNAbp domain and the polymerase domain.

[0205] In certain embodiments, the napDNAbp is a canonical SpCas9 polypeptide of SEQ ID NO: 82, as follows:

| | | |
|---|---|---|
| SpCas9 | MDKKYSIGLDIGTNSVGWAVITDEYKVPSKKFKVLGN | SEQ ID NO: 82 |
| Streptococcus | TDRHSIKKNLIGALLFDSGETAEATRLKRTARRRYTRR | |
| pyogenes | KNRICYLQEIFSNEMAKVDDSFFHRLEESFLVEEDKKH | |
| M1 | ERHPIFGNIVDEVAYHEKYPTIYHLRKKLVDSTDKADL | |
| Swis sProt | RLIYLALAHMIKFRGHFLIEGDLNPDNSDVDKLFIQLVQ | |
| Accession | TYNQLFEENPINASGVDAKAILSARLSKSRRLENLIAQL | |
| No. | PGEKKNGLFGNLIALSLGLTPNFKSNFDLAEDAKLQLS | |
| Q99ZW2 | KDTYDDDLDNLLAQIGDQYADLFLAAKNLSDAILLSDI | |
| Wild type | LRVNTEITKAPLSASMIKRYDEHHQDLTLLKALVRQQL | |
| 1368 AA | PEKYKEIFFDQSKNGYAGYIDGGASQEEFYKFIKPILEK | |
| | MDGTEELLVKLNREDLLRKQRTFDNGSIPHQIHLGELH | |
| | AILRRQEDFYPFLKDNREKIEKILTFRIPYYVGPLARGN | |
| | SRFAWMTRKSEETITPWNFEEVVDKGASAQSFIERMTN | |
| | FDKNLPNEKVLPKHSLLYEYFTVYNELTKVKYVTEGM | |
| | RKPAFLSGEQKKAIVDLLFKTNRKVTVKQLKEDYFKKI | |
| | ECFDSVETSGVEDRFNASLGTYHDLLKIIKDKDFLDNEE | |
| | NEDILEDIVLTLTLFEDREMIEERLKTYAHLFDDKVMK | |
| | QLKRRRYTGWGRLSRKLINGIRDKQSGKTILDFLKSDG | |
| | FANRNFMQLIHDDSLTFKEDIQKAQVSGQGDSLHEHIA | |
| | NLAGSPAIKKGILQTVKVVDELVKVMGRHKPENIVIEM | |
| | ARENQTTQKGQKNSRERMKRIEEGIKELGSQILKEHPV | |
| | ENTQLQNEKLYLYYLQNGRDMYVDQELDINRLSDYD | |
| | VDHIVPQSFLKDDSIDNKVLTRSDKNRGKSDNVPSEEV | |
| | VKKMKNYWRQLLNAKLITQRKFDNLTKAERGGLSEL | |
| | DKAGFIKRQLVETRQITKHVAQILDSRMNTKYDENDK | |
| | LIREVKVITLKSKLVSDFRKDFQFYKVREINNYHHAHD | |
| | AYLNAVVGTALIKKYPKLESEFVYGDYKVYDVRKMIA | |
| | KSEQEIGKATAKYFFYSNIMNFFKTEITLANGEIRKRPLI | |
| | ETNGETGEIVWDKGRDFATVRKVLSMPQVNIVKKTEV | |
| | QTGGFSKESILPKRNSDKLIARKKDWDPKKYGGFDSPT | |
| | VAYSVLVVAKVEKGKSKKLKSVKELLGITIMERSSFEK | |
| | NPIDFLEAKGYKEVKKDLIIKLPKYSLFELENGRKRML | |
| | ASAGELQKGNELALPSKYVNFLYLASHYEKLKGSPED | |
| | NEQKQLFVEQHKHYLDEIIEQISEFSKRVILADANLDKV | |
| | LSAYNKHRDKPIREQAENIIHLFTLTNLGAPAAFKYFDT | |
| | TIDRKRYTSTKEVLDATLIHQSITGLYETRIDLSQLGGD | |

[0206] In certain embodiments, the SpCas9 is split into two fragments at a split site located between residues 1 and 2, or 2 and 3, or 3 and 4, or 4 and 5, or 5 and 6, or 6 and 7, or 7 and 8, or 8 and 9, or 9 and 10, or between any two pair of residues located anywhere between residues 1-10, 10-20, 20-30, 30-40, 40-50, 50-60, 60-70, 70-80, 80-90, 90-100, 100-200, 200-300, 300-400, 400-500, 500-600, 600-700, 700-800, 800-900, 1000-1100, 1100-1200, 1200-1300, or 1300-1368 of canonical SpCas9 of SEQ ID NO: 11.

[0207] In certain embodiments, a napDNAbp is split into two fragments at a split site that is located at a pair of residue that corresponds to any two pair of residues located anywhere between positions 1-10, 10-20, 20-30, 30-40, 40-50, 50-60, 60-70, 70-80, 80-90, 90-100, 100-200, 200-300, 300-400, 400-500, 500-600, 600-700, 700-800, 800-900, 1000-1100, 1100-1200, 1200-1300, or 1300-1368 of canonical SpCas9 of SEQ ID NO: 11.

[0208] In certain embodiments, the SpCas9 is split into two fragments at a split site located between residues 1 and 2, or 2 and 3, or 3 and 4, or 4 and 5, or 5 and 6, or 6 and 7, or 7 and 8, or 8 and 9, or 9 and 10, or between any two pair of residues located anywhere between residues 1-10, 10-20, 20-30, 30-40, 40-50, 50-60, 60-70, 70-80, 80-90, 90-100, 100-200, 200-300, 300-400, 400-500, 500-600, 600-700, 700-800, 800-900, 1000-1100, 1100-1200, 1200-1300, or 1300-1368 of canonical SpCas9 of SEQ ID NO: 11. In certain embodiments, the split site is located one or more polypeptide bond sites (i.e., a “split site or split-intein split site”), fused to a split intein, and then delivered to cells as separately-encoded fusion proteins. Once the split-intein fusion proteins (i.e., protein halves) are expressed within a cell, the proteins undergo trans-splicing to form a complete or whole PE with the concomitant removal of the joined split-intein sequences.

[0209] For example, the N-terminal extein can be fused to a first split-intein (e.g., N intein) and the C-terminal extein can be fused to a second split-intein (e.g., C intein). The N-terminal extein becomes fused to the C-terminal extein to reform a whole genome editor fusion protein comprising an napDNAbp domain and a polymerase domain (e.g., RT domain) upon the self-association of the N intein and the C intein inside the cell, followed by their self-excision, and the concomitant formation of a peptide bond between the N-terminal extein and C-terminal extein portions of a whole genome editor (GE).

[0210] To take advantage of a split-PE delivery strategy using split-inteins, the genome editor needs to be divided at one or more split sites to create at least two separate halves of a genome editor, each of which may be rejoined inside a cell if each half is fused to a split-intein sequence.

[0211] In certain embodiments, the genome editor is split at a single split site. In certain other embodiments, the genome editor is split at two split sites, or three split sites, or four split sites, or more.

[0212] In a preferred embodiment, the genome editor is split at a single split site to create two separate halves of a genome editor, each of which can be fused to a split intein sequence

[0213] An exemplary split intein is the Ssp DnaE intein, which comprises two subunits, namely, DnaE-N and DnaE-C. The two different subunits are encoded by separate genes, namely dnaE-n and dnaE-c, which encode the DnaE-N and DnaE-C subunits, respectively. DnaE is a naturally occurring split intein in Synechocytis sp. PCC6803 and is capable of directing trans-splicing of two separate proteins, each comprising a fusion with either DnaE-N or DnaE-C.

[0214] Additional naturally occurring or engineered split-intein sequences are known in the or can be made from whole-intein sequences described herein or those available in the art. Examples of split-intein sequences can be found in Stevens et al., “A promiscuous split intein with expanded protein engineering applications,” PNAS, 2017, Vol. 114: 8538-8543; Iwai et al., “Highly efficient protein trans-splicing by a naturally split DnaE intein from Nostc punctiforme, FEBS Lett, 580: 1853-1858, each of which are incorporated herein by reference. Additional split intein sequences can be found, for example, in WO 2013/045632, WO 2014/055782, WO 2016/069774, and EP2877490, the contents each of which are incorporated herein by reference.

[0215] In addition, protein splicing in trans has been described in vivo and in vitro (Shingledecker, et al., Gene 207:187 (1998), Southworth, et al., EMBO J. 17:918 (1998); Mills, et al., Proc. Natl. Acad. Sci. USA, 95:3543-3548 (1998); Lew, et al., J. Biol. Chem., 273:15887-15890 (1998); Wu, et al., Biochim. Biophys. Acta 35732:1 (1998b), Yamazaki, et al., J. Am. Chem. Soc. 120:5591 (1998), Evans, et al., J. Biol. Chem. 275:9091 (2000); Otomo, et al., Biochemistry 38:16040-16044 (1999); Otomo, et al., J. Biolmol. NMR 14:105-114 (1999); Scott, et al., Proc. Natl. Acad. Sci. USA 96:13638-13643 (1999)) and provides the opportunity to express a protein as to two inactive fragments that subsequently undergo ligation to form a functional product.

[0216] In various embodiments described herein, the continuous evolution methods (e.g., PACE) may be used to evolve a first portion of a base editor. A first portion could include a single component or domain, e.g., a Cas9 domain, a deaminase domain, or a UGI domain. The separately evolved component or domain can be then fused to the remaining portions of the base editor within a cell by separately express both the evolved portion and the remaining non-evolved portions with split-intein polypeptide domains. The first portion could more broadly include any first amino acid portion of a base editor that is desired to be evolved using a continuous evolution method described herein. The second portion would in this embodiment refer to the remaining amino acid portion of the base editor that is not evolved using the herein methods. The evolved first portion and the second portion of the base editor could each be expressed with split-intein polypeptide domains in a cell. The natural protein splicing mechanisms of the cell would reassemble the evolved first portion and the non-evolved second portion to form a single fusion protein evolved base editor. The evolved first portion may comprise either the N- or C-terminal part of the single fusion protein. In an analogous manner, use of a second orthogonal trans-splicing intein pair could allow the evolved first portion to comprise an internal part of the single fusion protein.

[0217] Thus, any of the evolved and non-evolved components of the base editors herein described may be expressed with split-intein tags in order to facilitate the formation of a complete base editor comprising the evolved and non-evolved component within a cell.

[0218] The mechanism of the protein splicing process has been studied in great detail (Chong, et al., J. Biol. Chem. 1996, 271, 22159-22168; Xu, M-Q & Perler, F. B. EMBO Journal, 1996, 15, 5146-5153) and conserved amino acids have been found at the intein and extein splicing points (Xu, et al., EMBO Journal, 1994, 13 5517-522). The constructs described herein contain an intein sequence fused to the 5′-terminus of the first gene (e.g., the evolved portion of the base editor). Suitable intein sequences can be selected from any of the proteins known to contain protein splicing elements. A database containing all known inteins can be found on the World Wide Web (Perler, F. B. Nucleic Acids Research, 1999, 27, 346-347). The intein sequence is fused at the 3′ end to the 5′ end of a second gene. For targeting of this gene to a certain organelle, a peptide signal can be fused to the coding sequence of the gene. After the second gene, the intein-gene sequence can be repeated as often as desired for expression of multiple proteins in the same cell. For multi-intein containing constructs, it may be useful to use intein elements from different sources. After the sequence of the last gene to be expressed, a transcription termination sequence must be inserted. In one embodiment, a modified intein splicing unit is designed so that it can both catalyze excision of the exteins from the inteins as well as prevent ligation of the exteins. Mutagenesis of the C-terminal extein junction in the Pyrococcus species GB-D DNA polymerase was found to produce an altered splicing element that induces cleavage of exteins and inteins but prevents subsequent ligation of the exteins (Xu, M-Q & Perler, F. B. EMBO Journal, 1996, 15, 5146-5153). Mutation of serine 538 to either an alanine or glycine induced cleavage but prevented ligation. Mutation of equivalent residues in other intein splicing units should also prevent extein ligation due to the conservation of amino acids at the C-terminal extein junction to the intein. A preferred intein not containing an endonuclease domain is the Mycobacterium xenopi GyrA protein (Telenti, et al. J. Bacteriol. 1997, 179, 6378-6382). Others have been found in nature or have been created artificially by removing the endonuclease domains from endonuclease containing inteins (Chong, et al. J. Biol. Chem. 1997, 272, 15587-15590). In a preferred embodiment, the intein is selected so that it consists of the minimal number of amino acids needed to perform the splicing function, such as the intein from the Mycobacterium xenopi GyrA protein (Telenti, A., et al., J. Bacteriol. 1997, 179, 6378-6382). In an alternative embodiment, an intein without endonuclease activity is selected, such as the intein from the Mycobacterium xenopi GyrA protein or the Saccharaomyces cerevisiae VMA intein that has been modified to remove endonuclease domains (Chong, 1997). Further modification of the intein splicing unit may allow the reaction rate of the cleavage reaction to be altered allowing protein dosage to be controlled by simply modifying the gene sequence of the splicing unit.

[0219] Inteins can also exist as two fragments encoded by two separately transcribed and translated genes. These so-called split inteins self-associate and catalyze protein-splicing activity in trans. Split inteins have been identified in diverse cyanobacteria and archaea (Caspi et al, Mol Microbiol. 50: 1569-1577 (2003); Choi J. et al, J Mol Biol. 556: 1093-1106 (2006); Dassa B. et al, Biochemistry. 46:322-330 (2007); Liu X. and Yang J., J Biol Chem. 275:26315-26318 (2003); Wu H. et al.

[0220] Proc Natl Acad Sci USA. 5:9226-9231 (1998); and Zettler J. et al, FEBS Letters. 553:909-914 (2009)), but have not been found in eukaryotes thus far. Recently, a bioinformatic analysis of environmental metagenomic data revealed 26 different loci with a novel genomic arrangement. At each locus, a conserved enzyme coding region is interrupted by a split intein, with a freestanding endonuclease gene inserted between the sections coding for intein subdomains. Among them, five loci were completely assembled: DNA helicases (gp41-1, gp41-8); Inosine-5′-monophosphate dehydrogenase (IMPDH-1); and Ribonucleotide reductase catalytic subunits (NrdA-2 and NrdJ-1). This fractured gene organization appears to be present mainly in phages (Dassa et al, Nucleic Acids Research. 57:2560-2573 (2009)).

[0221] The split intein Npu DnaE was characterized as having the highest rate reported for the protein trans-splicing reaction. In addition, the Npu DnaE protein splicing reaction is considered robust and high-yielding with respect to different extein sequences, temperatures from 6 to 37° C., and the presence of up to 6M Urea (Zettler J. et al, FEBS Letters. 553:909-914 (2009); Iwai I. et al, FEBS Letters 550: 1853-1858 (2006)). As expected, when the Cysl Ala mutation at the N-domain of these inteins was introduced, the initial N to S-acyl shift and therefore protein splicing was blocked. Unfortunately, the C-terminal cleavage reaction was also almost completely inhibited. The dependence of the asparagine cyclization at the C-terminal splice junction on the acyl shift at the N-terminal scissile peptide bond seems to be a unique property common to the naturally split DnaE intein alleles (Zettler J. et al. FEBS Letters. 555:909-914 (2009)).

[0222] The mechanism of protein splicing typically has four steps [29-30]: 1) an N—S or N—O acyl shift at the intein N-terminus, which breaks the upstream peptide bond and forms an ester bond between the N-extein and the side chain of the intein's first amino acid (Cys or Ser); 2) a transesterification relocating the N-extein to the intein C-terminus, forming a new ester bond linking the N-extein to the side chain of the C-extein's first amino acid (Cys, Ser, or Thr); 3) Asn cyclization breaking the peptide bond between the intein and the C-extein; and 4) a S—N or O—N acyl shift that replaces the ester bond with a peptide bond between the N-extein and C-extein.

[0223] Protein trans-splicing, catalyzed by split inteins, provides an entirely enzymatic method for protein ligation. A split-intein is essentially a contiguous intein (e.g. a mini-intein) split into two pieces named N-intein and C-intein, respectively. The N-intein and C-intein of a split intein can associate non-covalently to form an active intein and catalyze the splicing reaction essentially in same way as a contiguous intein does. Split inteins have been found in nature and also engineered in laboratories. As used herein, the term “split intein” refers to any intein in which one or more peptide bond breaks exists between the N-terminal and C-terminal amino acid sequences such that the N-terminal and C-terminal sequences become separate molecules that can non-covalently reassociate, or reconstitute, into an intein that is functional for trans-splicing reactions. Any catalytically active intein, or fragment thereof, may be used to derive a split intein for use in the methods of the invention. For example, in one aspect the split intein may be derived from a eukaryotic intein. In another aspect, the split intein may be derived from a bacterial intein. In another aspect, the split intein may be derived from an archaeal intein. Preferably, the split intein so-derived will possess only the amino acid sequences essential for catalyzing trans-splicing reactions.

[0224] As used herein, the “N-terminal split intein (In)” refers to any intein sequence that comprises an N-terminal amino acid sequence that is functional for trans-splicing reactions. An In thus also comprises a sequence that is spliced out when trans-splicing occurs. An In can comprise a sequence that is a modification of the N-terminal portion of a naturally occurring intein sequence. For example, an In can comprise additional amino acid residues and/or mutated residues so long as the inclusion of such additional and/or mutated residues does not render the In non-functional in trans-splicing. Preferably, the inclusion of the additional and/or mutated residues improves or enhances the trans-splicing activity of the In.

[0225] As used herein, the “C-terminal split intein (Ic)” refers to any intein sequence that comprises a C-terminal amino acid sequence that is functional for trans-splicing reactions. In one aspect, the Ic comprises 4 to 7 contiguous amino acid residues, at least 4 amino acids of which are from the last β-strand of the intein from which it was derived. An Ic thus also comprises a sequence that is spliced out when trans-splicing occurs. An Ic can comprise a sequence that is a modification of the C-terminal portion of a naturally occurring intein sequence. For example, an Ic can comprise additional amino acid residues and/or mutated residues so long as the inclusion of such additional and/or mutated residues does not render the In non-functional in trans-splicing. Preferably, the inclusion of the additional and/or mutated residues improves or enhances the trans-splicing activity of the Ic.

[0226] In some embodiments of the invention, a peptide linked to an Ic or an In can comprise an additional chemical moiety including, among others, fluorescence groups, biotin, polyethylene glycol (PEG), amino acid analogs, unnatural amino acids, phosphate groups, glycosyl groups, radioisotope labels, and pharmaceutical molecules. In other embodiments, a peptide linked to an Ic can comprise one or more chemically reactive groups including, among others, ketone, aldehyde, Cys residues and Lys residues. The N-intein and C-intein of a split intein can associate non-covalently to form an active intein and catalyze the splicing reaction when an “intein-splicing polypeptide (ISP)” is present. As used herein, “intein-splicing polypeptide (ISP)” refers to the portion of the amino acid sequence of a split intein that remains when the Ic, In, or both, are removed from the split intein. In certain embodiments, the In comprises the ISP. In another embodiment, the Ic comprises the ISP. In yet another embodiment, the ISP is a separate peptide that is not covalently linked to In nor to Ic.

[0227] Split inteins may be created from contiguous inteins by engineering one or more split sites in the unstructured loop or intervening amino acid sequence between the −12 conserved beta-strands found in the structure of mini-inteins. Some flexibility in the position of the split site within regions between the beta-strands may exist, provided that creation of the split will not disrupt the structure of the intein, the structured beta-strands in particular, to a sufficient degree that protein splicing activity is lost.

[0228] In protein trans-splicing, one precursor protein consists of an N-extein part followed by the N-intein, another precursor protein consists of the C-intein followed by a C-extein part, and a trans-splicing reaction (catalyzed by the N- and C-inteins together) excises the two intein sequences and links the two extein sequences with a peptide bond. Protein trans-splicing, being an enzymatic reaction, can work with very low (e.g. micromolar) concentrations of proteins and can be carried out under physiological conditions.

### [2] Ribozymes

[0229] The genome editing system described here comprise one or more ribozymes. The ribozymes can be naturally occurring in some embodiments so long as the naturally occurring ribozymes are capable of using DNA as a substrate. In other embodiments, the ribozymes can be derived from naturally occurring ribozymes, e.g., by genetic engineering, mutagenesis, or installation of chemical modifications into a naturally occurring ribozyme. The ribozymes may also be fully synthetic. In preferred embodiments, the ribozymes should possess (a) the capability of annealing to a strand of the target edit site bound by a napDNAbp/guide RNA complex, (b) cleaving a phosphodiester bond at a ribozyme nick site on the annealed strand, (c) installing on the annealed strand one or more nucleotides at the ribozyme nick site, and then (d) ligating the installed one or more nucleotides to the annealed strand.

[0230] In one embodiment, the ribozyme can be the engineered ribozyme of FIG. 1A. FIG. 1A shows the sequence and secondary structure of (a) an exemplary engineered ribozyme based on the ribozyme of Tetrahymena group I intron with mutations identified in directed evolution that enable the ribozyme to bind and cleave ssDNA (blue and/or indicated with a “star”) and insertions and deletions that enable nucleotide (e.g., GTP) insertion (red boxes). For example, element (b) refers to the deletion of the terminal nucleotides (e.g., the terminal 4 nucleotides) of the ribozyme, which inactivates the self-insertion activity of the ribozyme for self-insertion into the DNA target or substrate with which the ribozyme is interacting. This is also shown in more details in FIG. 3B. Element (c) shows engineered changes in the active site which interacts with the substrate DNA, catalyzing the insertion of the nucleotide at the target site of the target DNA substrate. Element (d) refers to the location or site of insertion of an MS2 hairpin (AUCUU sequence is removed and replaced with the MS2 hairpin), which functions as a targeting moiety to localize the engineered ribozyme to a bound napDNAbp/guide RNA complex to a target DNA site, wherein the napDNAbp is modified to incorporate a cognate targeting moiety receptor. The nucleotide sequence of the ribozyme of FIG. 1A, as shown, is SEQ ID NO: 88.

[0231] The combination of FIGS. 2A and 2D depict an embodiment of the ribozymes contemplated herein and how they function in relation to a napDNAbp/guide RNA complex at target site in DNA. FIG. 2A is a schematic showing the repair of a frameshift mutation via single-nucleotide insertion of a G into genomic DNA as carried about by a genomic editing system comprising a ribozyme (referred to as a “group I insertase”, which is one broad category of ribozymes known in the art) and a Cas9/guide RNA complex. In reference to FIG. 2A and also the detailed illustration of FIG. 2D, binding of the Cas9/guide RNA complex to genomic DNA forms a ssDNA R-loop opposite the strand occupied by the guide RNA's spacer sequence. The engineered ribozyme (as provided in trans) then binds to its single strand DNA substrate, whereby a portion of the ribozyme anneals to the single strand DNA of the R loop over a short complementary (or partly complementary) sequence (e.g., at least a 3, at least a 4, at least a 5, at least a 6, at least a 7, at least a 8, at least a 9, at least a 10, at least an 11, at least a 12, at least a 13, at least a 14, or at least a 15 nucleotide stretch in the R loop region). Once hybridized to the R loop at the complementary region, the ribozyme installs a ribozyme nick in the R loop strand, leaving . . . A-5′ and 3′-T . . . ends on either side of the nick. The ribozyme then catalyzes the formation of a phosphodiester bond between the . . . A-5′ end and a G. There is then a shift in hybridization pairing by one base pair of the annealed strand which moves one base position towards the 5′ end of the ribozyme. Lastly, the ribozyme catalyzes a ligation between the inserted G and the pre-existing T to form a new phosphodiester bond, thereby ligating the previously-nicked strands together again, which now includes the inserted G as a +1 nucleotide. In subsequent rounds of replication and/or DNA repair, the inserted G leads to the introduction of a C base pair on the opposite strand, thereby permanently installing a G:C nucleobase pair, and thus, a frameshift change. The ribozyme is released and can participate in another such reaction.

[0232] FIG. 3B shows the structural and functional details of an embodiment of a ribozyme contemplated for use in the present genome editing system. The skilled person will appreciate that the various sequence regions defined in FIG. 3B can be varied so long as they maintain their function. For example, the region labeled as “(j)” may be adjusted based on the target sequence of the R loop induced to form by a given napDNAbp/guide RNA complex. Element (a) refers to the exemplary engineered ribozyme contemplated herein which is annealed at elements (h), (i), and (j) to a complementary or mostly complementary region in the R loop of a Cas9/guide RNA complex (complex not depicted). Element (b) represents the backbone portion of an exemplary engineered ribozyme, which can include the nucleotides in FIG. 1A identified with a “star” symbol, which enable the ribozyme to bind and act on DNA, as opposed to a natural RNA substrate. Examples of such modifications can be found described in Joyce et al., “Selection in vitro of an RNA enzyme that specifically cleaves single-stranded DNA,” Nature, 1990, p. 467, which is incorporated herein by reference. Element (c) refers to the deletion of the terminal nucleotides (e.g., the terminal 4 nucleotides) of the ribozyme, which inactivates or removes the self-insertion activity of the ribozyme for self-insertion into the DNA target or substrate with which the ribozyme is interacting. Element (d) refers to a GTP (nucleotide) substrate, which is inserted by the ribozyme into the DNA at the insertion site between elements (h) and (i) to change the target edit DNA sequence from GATCTGGG-5′ to GAGTCTGGG-5′. Without being bound by theory, and in reference to the stepwise mechanism of FIG. 2D, insertion would result in the breakage of the phosphodiester bond between the A and T nucleotides in the DNA substrate, inserting of a G from the GTP at the insertion site through formation of a phosphiester bond between the inserted G and the existing A on the DNA strand. The downstream A-G- would then shift such that the G would hybridize to the unpaired C in the ribozyme (the C located at element (g)), causing at the same time the pairing of the inserted G with the U on the ribozyme in element (h). Lastly, the ribozyme would catalyze the ligation of the introduced G to the upstream T in element (i), thereby introducing a G into the target DNA sequence. Through subsequent DNA repair and/or replication processes, a complete G:C nucleobase pair will have been inserted/incorporated into the double strand DNA target site.

[0233] Element (d) can preferably be a GTP or an ATP. In some embodiments, element (d) can be a TTP or a CTP. Element (e) refers to G nucleotides which facilitate effective transcription of the ribozyme. Element (f) refers to an extension of the P0 region of the ribozyme, which improves the binding of the substrate DNA to the ribozyme (e.g., as described further in Tsang and Joyce, “Specialization of the DNA-cleaving activity of a group I ribozyme through in vitro evolution,” J. Mol. Biol., 1996, 262(1):31-42, which is incorporated herein by reference). The length of this region can vary, e.g., can be from about 1-10 nucleobase pairs, or 2-12 nucleobase pairs, or 3-13 nucleobase pairs, or 4-14 nucleobase pairs, or from 5-20 nucleobase pairs, or the length can be 1, 2, 3, 4, 5, 6, 7, 8, 9, 10, 11, 12, 13, 14, 15, 16, 17, 18, 19, 20, 21, 22, 23, 24, 25, 26, 27, 28, 29, or 30, or more nucleotides. Element (g) is an unpaired nucleotide, which results in fewer required purines of element (h) needed to shift the substrate sequences upon insertion of the new nucleotide (e.g., GTP). In the example shown, element (g) is an unpaired C, however this can be G, A, or T, in some embodiments.

[0234] Since regions (f), (h), (i), and (j) of the P0 region of the ribozyme of FIG. 3B will depend upon the sequence of the target strand, these nucleotide sequences can be varied, in various embodiments, in accordance with the following rules in order to interact with a desired target sequence:

[0235] Rule 1: Region (j) should form the complement of the target sequence over a multi-nucleotide stretch. In the embodiment shown, the stretch of nucleotides shown in (j) is 5 nucleotides; however, this region could range from 3 nucleotides, 4 nucleotides, 5 nucleotides, 6 nucleotides, 7 nucleotides, 8 nucleotides, 9 nucleotides, 10 nucleotides, 11 nucleotides, 12 nucleotides, 13 nucleotides, 14 nucleotides, 15 nucleotides, or more. The longer the region (j), the longer the region of complementarity is needed in the target sequence, which will be limited to the length of the single-stranded region of the R loop of the Cas9/guideRNA bubble. The exact sequence of the complementary target sequence will depend upon the R loop sequence, which is determined, in turn, by the sequence that is targeted by the napDNAbp/guide RNA complex.

[0236] Rule 2: Region (i) is the “wobble” position. Preferably, the wobble position is created by an imperfect Watson-Crick hydrogen bond pairing. Thus, if the target sequence is a T at position corresponding to (i), then position (i) in the ribozyme should be designed as G, C, or T, but not an A. If the target sequence is an A as position corresponding to (i), then position (i) in the ribozyme should be designed as G, C, or A, but not a T. If the target sequence is a G at position corresponding to (i), then position (i) in the ribozyme should be designed as T, A, or G, but not a C. If the target sequence is a C at position corresponding to (i), then position (i) in the ribozyme should be designed as T, A, or C, but not a G. These conditions should provide for imperfect Watson-Crick hydrogen bond pairing, or wobble pairing.

[0237] Rule 3: Preferably, element (h) of the ribozyme should be a string of uracils, and can include a string of 1, 2, 3, 4, 5, 6, 7, 8, 9, 10, 11, 12, 13, 14, 15, or more uracils at this position. Preferably, the element (h) is a string of two consecutive uracils.

[0238] Rule 4: Preferably, there is an extra C inserted at position (g) in the ribozyme, which will facilitate the shifting of the target sequence upward such that a hydrogen bond forms between the G in the target sequence corresponding to position (h) in the ribozyme, leaving room for insertion of a nucleotide (e.g., GTP) of element (d). This means that preferably the 3′-most nucleotide in the target sequence opposite element (h) of the ribozyme is a G, so that it may hydrogen bond with the extra C at position (g).

[0239] Rule 5: Element (f) can be designed as a complement to additional target sequence to enhance the binding of the ribozyme to the target sequence.

[0240] Element (h) is a series of pyrimidine-purine nucleobase pairs (e.g., can be 1, 2, 3, 4, or 5 or more U-G, U-A, or C-G nucleobase pairs) that sit adjacent to the “wobble” nucleobase pair of element (i). The nucleobases of element (h) function to enable shifting in the active site of the ribozyme (or shifting of the target DNA sequence) upon insertion of the nucleotide of element (d) (e.g., the GTP). The nucleobases of element (h) also enable the ligation step at the nick site formed subsequent or simultaneous to the GTP insertion (i.e., or another nucleotide of element (d)). Element (i) is a “wobble” nucleobase pair. In the example, the wobble nucleobase is a G-T pair, but other wobble pairs are acceptable. Element (j) represents the region of the active site which recognizes the DNA substrate (i.e., the target sequence, e.g., the R loop of a Cas9/guide RNA complex formed at a target DNA site). The region shown has the sequence 5′-GGACCC-3′, which is exemplary. This sequence can be represented more broadly at 5′-SSSWST-3′, wherein S is G or C and W is A or T.

[0241] The “active” site of the ribozyme for purposes of this disclosure can comprise elements (i) and (h). More broadly, the “active” site may refer to regions (g), (h), (i), and (j) since all four regions are involved in different aspects of the mechanism of insertion by the ribozyme. In general, element (j) binds and interacts with the target DNA substrate, element (i) is a “wobble” pair that helps define the location of the insertion point as between element (i) and (h), element (h) facilitates the upward (i.e., in the 5′ to 3′ direction, i.e., downstream shifting) shifting of the DNA substrate following the breakage or nicking of the phosphodiester bond between elements (h) and (i) on the DNA substrate. Element (g) also facilitates the downstream shift of the nicked portion of the DNA substrate (due to the interaction of the C on the ribozyme and the G on the DNA), making room for insertion of the G into the nicked site, and the subsequent ligation of that nucleotide to reform the DNA now-modified+1 nucleotide DNA substrate.

[0242] The herein disclosed genome editing system may comprise any known or obtainable ribozyme. The ribozymes can be naturally occurring in some embodiments so long as the naturally occurring ribozymes are capable of using DNA as a substrate. The ribozymes can also be derived from naturally occurring ribozymes, e.g., by genetic engineering, mutagenesis, or installation of chemical modifications into a naturally occurring ribozyme. The ribozymes may also be fully synthetic.

[0243] Naturally occurring ribozymes include, but are not limited to, RNase P, ribosomal RNA (rRNA), hammerhead ribozyme, hairpin ribozyme, twister ribozyme, twister sister ribozyme, hatchet ribozyme, pistol ribozyme, GIR1 branching ribozyme, glmS ribozyme, and splicing ribozymes (e.g., Group I self-splicing intron and Group II self-splicing intron). The genome editing systems (e.g., complexes comprising napDNAbp, guide RNA, and a ribozyme), pharmaceutical compositions, kits, and methods of editing may utilize naturally occurring ribozymes (modified to act on DNA), variants thereof, or artificial or engineered ribozymes, such as those described herein.

[0244] In various embodiments, the ribozymes are “engineered ribozymes” which refers to ribozymes which have been modified in one or more specific ways to modify one or more functions of the ribozyme. The ribozymes can be naturally occurring or genetically engineered. The ribozymes can also be modified to include one or more targeting moieties to facilitate localization of the ribozyme to a DNA-bound napDNAbp/guide RNA complex, wherein the napDNAbp (e.g., Cas9) has been modified to comprise a cognate targeting moiety receptor.

[0245] In some embodiments, the ribozyme is a modified group I intron from Tetrahymena thermophila, which has the following nucleotide sequence:

[0246] GUGGGACCCAAAAGUUAUCAGGCAUACACCUGGAGAAUAGCUAGUCUU UAAACCAAUAGAUUGCAUCGGUUUAAAGGCUAGACCGUCAAAUUGCGGGAAU AGGGUCAACAGCCGUUCAGUACCAAGUCUCAGGGGAAACUUUGAGAUGGCAU UGUAAAGGGUAUGGUAAUAAACAUACGGACAUGGUCCCAACCACGCAACCAA GUCCUAAGUCAACAGUCUCGUACACCAUCAGGGUACGUCUCAGACACCAUCAG GGUCUGUCUGGUACAGCAUCAGCGUACCCUGUUGAUAUGGAUGCAGUUCACA GACUAAAUGUCGGUCGGGGAAGAUGUAUUCUUCUCAUAAGAUAUAGUCGCGC CUCUCCUUAAUGGGAGCUAGCGGAUGAAGUGAUGCAACACUGGAGCCGCUGG GAACUAAUUUGUAUGCGAAAGUAUAUUGAUUAGUUUUGGAGUA [SEQ ID NO: 83], or a ribozyme comprising a nucleotide sequence that is at least 85%, at least 90%, at least 91%, at least 92%, at least 93%, at least 94%, at least 95%, at least 96%, at least 97%, at least 98%, at least 99%, or at least 99.5% identical to the above sequence.

[0247] In other embodiments, the ribozyme is a modified group I intron ribozyme from Tetrahymena thermophile having the following nucleotide sequence:

[0248] GCAGGGAAAAGUUAUCAGGCAUACACCUGGAGAAUAGCUAGUCUUUAA ACCAAUAGAUUGCAUCGGUUUAAAGGCUAGACCGUCAAAUUGCGGGAAUAGG GUCAACAGCCGUUCAGUACCAAGUCUCAGGGGAAACUUUGAGAUGGCAUUGU AAAGGGUAUGGUAAUAAACAUACGGACAUGGUCCCAACCACGCAACCAAGUCC UAAGUCAACAGUCUCGUACACCAUCAGGGUACGUCUCAGACACCAUCAGGGUC UGUCUGGUACAGCAUCAGCGUACCCUGUUGAUAUGGAUGCAGUUCACAGACU AAAUGUCGGUCGGGGAAGAUGUAUUCUUCUCAUAAGAUAUAGUCGCGCCUCU CCUUAAUGGGAGCUAGCGGAUGAAGUGAUGCAACACUGGAGCCGCUGGGAAC UAAUUUGUAUGCGAAAGUAUAUUGAUUAGUUUUGGAGUA [SEQ ID NO: 84], or a ribozyme comprising a nucleotide sequence that is at least 85%, at least 90%, at least 91%, at least 92%, at least 93%, at least 94%, at least 95%, at least 96%, at least 97%, at least 98%, at least 99%, or at least 99.5% identical to the above sequence.

[0249] In some embodiments, the ribozyme is a modified group I intron from Tetrahymena thermophila containing a guide RNA (guide:ribozyme fusion), having the following nucleotide sequence:

[0250] GCAGCUGAGGGUCUCAUGGGCGUUUUAGAGCUAGAAAUAGCAAGUUAA AAUAAGGCUAGUCCGUUAUCAACUUGAAAAAGUGGCACCGAGUCGGUGCACA CGGACCCAAAAGUUAUCAGGCAUACACCUGGAGAAUAGCUAGUCUUUAAACCA AUAGAUUGCAUCGGUUUAAAGGCUAGACCGUCAAAUUGCGGGAAUAGGGUCA ACAGCCGUUCAGUACCAAGUCUCAGGGGAAACUUUGAGAUGGCAUUGUAAAG GGUAUGGUAAUAAACAUACGGACAUGGUCCCAACCACGCAACCAAGUCCUAAG UCAACAGAUCUUCUGUUGAUAUGGAUGCAGUUCACAGACUAAAUGUCGGUCG GGGAAGAUGUAUUCUUCUCAUAAGAUAUAGUCGCGCCUCUCCUUAAUGGGAG CUAGCGGAUGAAGUGAUGCAACACUGGAGCCGCUGGGAACUAAUUUGUAUGC GAAAGUAUAUUGAUUAGUUUUGGAGUA [SEQ ID NO: 85], or a ribozyme comprising a nucleotide sequence that is at least 85%, at least 90%, at least 91%, at least 92%, at least 93%, at least 94%, at least 95%, at least 96%, at least 97%, at least 98%, at least 99%, or at least 99.5% identical to the above sequence. In such embodiments, the guide RNA can facilitate the localization of ribozyme to the target site of DNA desired to be edited.

[0251] The ribozymes of the disclosed methods can be engineered. Ribozyme engineering can be broadly broken down into three distinct areas: (1) the recognition site where the ribozyme can be targeted to individual DNA sequences, (2) the 3′ terminus of the ribozyme where the active site is, and (3) the internal loop P6 (see the structure of FIG. 1A for reference), where large sequences can be inserted without drastically affecting ribozyme activity.

[0252] In some embodiments, the recognition site can be engineered to enable the ribozyme to both insert a GTP nucleotide into DNA (or another nucleotide) and then allow the now-nicked DNA substrate to shift within the active site, enabling the ribozyme to ligate the resulting nick and generate a +1 nucleotide product. The 3′ terminus of the enzyme can be engineered to prevent undesired enzymatic activity.

[0253] In some embodiments, the ribozyme can be modified to contain one or more targeting moieties. For example, an MS2-binding RNA hairpin (or more precisely N numbers of RNA hairpins) can be inserted into loop 6 to enable binding of the ribozyme to the MS2-Cas9 fusion protein (i.e., a Cas9 protein, or more broadly, a napDNAbp that has been modified to comprise a targeting moiety receptor.

[0254] Ribozymes can further be evolved to have improved activity, and those changes to the ribozyme likely will not be confined to these locations.

[0255] In certain embodiments, the ribozyme cannot be fused to Cas9. In certain other embodiments, the ribozyme is fused to the Cas9 via a linker. In still other embodiments, the ribozyme is recruited to and becomes coupled to the Cas9 via a recruitment means, e.g., an MS2 tagging system.

[0256] However, in other embodiments, the ribozyme could be fused to or co-transcribed with a guide RNA such that the ribozyme-guide RNA fusion localizes and binds to the target DNA site. In this embodiment, a napDNAbp (e.g., Cas9) would then interact with the guide RNA to form the R-loop and the single-strand DNA portion of the Cas9 bubble, which is acted upon by the ribozyme (which requires a single-strand DNA as a substrate).

[0257] Additional background on ribozymes and various ribozyme modifications that may be implemented herein include the following references, which are incorporated herein by reference:

[0258] Sullenger and Cech. Ribozyme-mediated repair of defective mRNA by targeted trans-splicing. Nature 1994 619;

[0259] Johnson, Sinha, and Testa. Trans insertion-splicing: ribozyme-catalyzed insertion of targeted sequences into RNAs. Biochemistry 2005 10702;

[0260] Bell, Johnson, and Testa. Ribozyme-catalyzed excision of targeted sequences from within RNAs. Biochemistry 2002 15327;

[0261] Robertson and Joyce. Selection in vitro of an RNA enzyme that specifically cleaves single-stranded DNA. Nature 1990 467;

[0262] Tsang and Joyce. Specialization of the DNA-cleaving activity of a group I ribozyme through in vitro evolution. J. Mol. Biol. 1996 262;

[0263] Dolan and Müller. Trans-splicing with the group I intron ribozyme from Azoarcus. RNA 2014 202; and

[0264] Guo and Cech. Evolution of Tetrahymena ribozyme mutants with increased structural stability. Nature Structural Biology 2002 855.

[0265] In addition, the following patent publications disclose ribozymes, ribozyme modifications, and methods for making such modifications. All such teachings and disclosures can be implemented to provide/obtain appropriate or suitable ribozymes for this disclose methods and are incorporated herein by reference.

| No. | Patent No. | Title | No. Seqs Disclosed |
|---|---|---|---|
| 1 | EP 0321201 B2 | Ribozymes | 27 |
| 2 | U.S. Pat. No. 5,856,463 A | Pskh-1 Ribozymes | 14 |
| 3 | U.S. Pat. No. 7,067,650 B1 | Ribozymes Targeting Bradeion | 23 |
| | | Transcripts And Use Thereof | |
| 4 | U.S. Pat. No. 6,015,794 A | Trans-splicing Ribozymes | 49 |
| 5 | U.S. Pat. No. 5,849,548 A | Cell Ablation Using Trans-splicing | 56 |
| | | Ribozymes | |
| 6 | US | Trans-splicing Ribozymes And Silent | 31 |
| | 2014/0283156 | Recombinases | |
| | A1 | | |
| 7 | U.S. Pat. No. 6,355,415 B1 | Compositions And Methods For | 27 |
| | | The Use Of Ribozymes To | |
| | | Determine Gene Function | |
| 8 | US | Conditionally Active Ribozymes And | 49 |
| | 2010/0305197 | Uses Thereof | |
| | A1 | | |
| 9 | U.S. Pat. No. 6,077,705 A | Ribozyme-mediated Gene Replacement | 25 |
| 10 | U.S. Pat. No. 6,716,973 B2 | Use Of A Ribozyme To Join Nucleic | 9 |
| | | Acids And Peptides | |

[0266] In addition, the following scientific publications disclose ribozymes, ribozyme modifications, and methods for making such modifications. All such teachings and disclosures can be implemented to provide/obtain appropriate or suitable ribozymes for this disclose methods and are incorporated herein by reference.

[0267] Bentin. A ribozyme transcribed by a ribozyme. Artif DNA PNA XNA. 2011 April; 2(2):40-42.

[0268] De la Pena et al., The Hammerhead Ribozyme: A Long History for a Short RNA. Molecules. 2017 Jan. 4; 22(1). pii: E78. doi: 10.3390/molecules22010078.

[0269] Muller. Design and Experimental Evolution of trans-Splicing Group I Intron Ribozymes. Molecules. 2017 Jan. 2; 22(1). pii: E75. doi: 10.3390/molecules22010075.

[0270] Samanata et al., A reverse transcriptase ribozyme. Elife. 2017 Sep. 26; 6. pii: e31153. doi: 10.7554/eLife.31153.

[0271] The following are a series of ribozyme sequences which are further exemplary of the ribozymes that may be used in the instant genome editing system, including a (i) first ribozyme (a naturally occurring ribozyme from Tetrahymena group I intron reported in Joyce et al., “Selection in vitro of an RNA enzyme that specifically cleaves single-stranded DNA,” Nature, 1990, p. 467, a (ii) second ribozyme (an evolved ribozyme reported in Joyce et al. to specifically cleave single-stranded DNA), a (iii) third ribozyme, which is a novel engineered variant of the second ribozyme comprising the indicated modified changes (and as shown in FIG. 1A), and a (iv) fourth ribozyme that is the third ribozyme but further modified to comprise an MS2 hairpin (i.e., MS2 aptamer) which facilitates the co-localization of the ribozyme to a napDNAbp/guide RNA complex wherein the napDNAbp is also modified to comprise the MPC protein of the MS2 tagging system.

[0272] These sequences are as follows:

[0273] Ribozyme (i) (wild type Joyce ribozyme)

[0274] 5′-TAATACGACTCACTATAGGAGGGAAAAGTTATCAGGCATGCACCTGGTAGCTAG TCTTTAAACCAATAGATTGCATCGGTTTAAAAGGCAAGACCGTCAAATTGCGGGA AAGGGGTCAACAGCCGTTCAGTACCAAGTCTCAGGGGAAACTTTGAGATGGCCT TGCAAAGGGTATGGTAATAAGCTGACGGACATGGTCCTAACCACGCAGCCAAGT CCTAAGTCAACAGATCTTCTGTTGATATGGATGCAGTTCACAGACTAAATGTCGG TCGGGGAAGATGTATTCTTCTCATAAGATATAGTCGGACCTCTCCTTAATGGGAG CTAGCGGATGAAGTGATGCAACACTGGAGCCGCTGGGAACTAATTTGTATGCGA AAGTATATTGATTAGTTTTGGAGTACTCG-3′ (SEQ ID NO: 86), or a ribozyme comprising a nucleotide sequence that is at least 85%, at least 90%, at least 91%, at least 92%, at least 93%, at least 94%, at least 95%, at least 96%, at least 97%, at least 98%, at least 99%, or at least 99.5% identical to SEQ ID NO: 86.

[0275] Ribozyme (ii) (evolved Joyce ribozyme)

[0276] 5′-TAATACGACTCACTATAGGAGGGAAAAGTTATCAGGCATACACCTGGAGAATAG CTAGTCTTTAAACCAATAGATTGCATCGGTTTAAAGGCTAGACCGTCAAATTGCG GGAATAGGGTCAACAGCCGTTCAGTACCAAGTCTCAGGGGAAACTTTGAGATGG CATTGTAAAGGGTATGGTAATAAACATACGGACATGGTCCCAACCACGCAACCA AGTCCTAAGTCAACAGATCTTCTGTTGATATGGATGCAGTTCACAGACTAAATGT CGGTCGGGGAAGATGTATTCTTCTCATAAGATATAGTCGCGCCTCTCCTTAATGG GAGCTAGCGGATGAAGTGATGCAACACTGGAGCCGCTGGGAACTAATTTGTATG CGAAAGTATATTGATTAGTTTTGGAGTACTCG-3′ (SEQ ID NO: 87), or a ribozyme comprising a nucleotide sequence that is at least 85%, at least 90%, at least 91%, at least 92%, at least 93%, at least 94%, at least 95%, at least 96%, at least 97%, at least 98%, at least 99%, or at least 99.5% identical to SEQ ID NO: 87.

[0277] Ribozyme (iii) (novel engineered ribozyme derived from evolved Joyce ribozyme and as shown in FIG. 1A)

(SEQ ID NO: 88)
5'-
GCCCTTGGACCCAAAAGTTATCAGGCATGCACCTGGTAGCTAGTCTTTAA
ACCAATAGATTGCATCGGTTTAAAAGGCAAGACCGTCAAATTGCGGGAAA
GGGGTCAACAGCCGTTCAGTACCAAGTCTCAGGGGAAACTTTGAGATGGC
CTTGCAAAGGGTATGGTAATAAGCTGACGGACATGGTCCTAACCACGCAG
CCAAGTCCTAAGTCAACAGATCTTCTGTTGATATGGATGCAGTTCACAGA
CTAAATGTCGGTCGGGGAAGATGTATTCTTCTCATAAGATATAGTCGGAC
CTCTCCTTAATGGGAGCTAGCGGATGAAGTGATGCAACACTGGAGCCGCT
GGGAACTAATTTGTATGCGAAAGTATATTGATTAGTTTTGGAGTA*-3',

or a ribozyme comprising a nucleotide sequence that is at least 85%, at least 90%, at least 91%, at least 92%, at least 93%, at least 94%, at least 95%, at least 96%, at least 97%, at least 98%, at least 99%, or at least 99.5% identical to SEQ ID NO: 88.

[0278] P0 (underlined), engineered to bind the targeted site and affect nucleotide ligation. This sequence region may be customized depending on the sequence of the target edit site.

[0279] * indicates deletion of 4 nt to prevent ribozyme insertion into DNA

[0280] Ribozyme (iv) (engineered ribozyme (iii) modified with MS2 aptamer)

(SEQ ID NO: 89)
CCGGACCCAAAAGTTATCAGGCATACACCTGGAGAATAGCTAGTCTTTAA
ACCAATAGATTGCATCGGTTTAAAGGCTAGACCGTCAAATTGCGGGAATA
GGGTCAACAGCCGTTCAGTACCAAGTCTCAGGGGAAACTTTGAGATGGCA
TTGTAAAGGGTATGGTAATAAACATACGGACATGGTCCCAACCACGCAAC
CAAGTCCTAAGTCAACAGTTTTTCGTACACCATCAGGGTACGTTTTTCAG
ACACCATCAGGGTCTGTTTTTGGTACAGCATCAGCGTACCTTTTTCGTAC
AGGATCACCGTACGTTTTTCAGACAGGATCACCGTCTGTTTTTCTGTTGA
TATGGATGCAGTTCACAGACTAAATGTCGGTCGGGGAAGATGTATTCTTC
TCATAAGATATAGTCGCGCCTCTCCTTAATGGGAGCTAGCGGATGAAGTG
ATGCAACACTGGAGCCGCTGGGAACTAATTTGTATGCGAAAGTATATTGA
TTAGTTTTGGAGTA*,

or a ribozyme comprising a nucleotide sequence that is at least 85%, at least 90%, at least 91%, at least 92%, at least 93%, at least 94%, at least 95%, at least 96%, at least 97%, at least 98%, at least 99%, or at least 99.5% identical to SEQ ID NO: 89.

[0281] P0 (underlined), engineered to bind the targeted site and affect nucleotide ligation. This sequence region may be customized depending on the sequence of the target edit site.

[0282] MS2 aptamer sequence (bold, underlined)

[0283] * indicates deletion of 4 nt to prevent ribozyme insertion into DNA Predicted secondary structure of Ribozyme (iv):

(SEQ ID NO: 90)
CCGGACCCAAAAGTTATCAGGCATACACCTGGAGAATAGCTAGTCTTTAA
...........<<<<<<<<<<......>>>>>....>>>>>.<<<<<<<<
ACCAATAGATTGCATCGGTTTAAAGGCTAGACCGTCAAATTGCGGGAATA
<<<.<<.......>>.>>>>>>>>>>>..(((((.(.....<<<<<....
GGGTCAACAGCCGTTCAGTACCAAGTCTCAGGGGAAACTTTGAGATGGCA
<<<<<<....<<<.<<<<<<<<<.<<<<<<<<<....>>>>>>>>>..>>
TTGTAAAGGGTATGGTAATAAACATACGGACATGGTCCCAACCACGCAAC
>.....>>>...>>>>.....>>>>>>>>...>>>>>>...>>.>>>>>>
CAAGTCCTAAGTCAACAGATCTTCTGTTGATATGGATGCAGTTCACAGAC
...>>>>...>>>>>>>>.....>>>>>>>>..>>>>...>>...<.<<<
TAAATGTCGGTCGGGGAAGATGTATTCTTCTCATAAGATATAGTCGCGCC
<<...).))))).<<<<<<<.....>>>>>>>........>>>>>>....
TCTCCTTAATGGGAGCTAGCGGATGAAGTGATGCAACACTGGAGCCGCTG
.<<<<<....>>>>><<<<<<<....<<<<......>>>>....>>>>>>
GGAACTAATTTGTATGCGAAAGTATATTGATTAGTTTTGGAGTA
>.<<<<<<<<.<<<<<<....>>>>>>.>>>>>>>>........

Key to structural symbols:
< > and ( ) indicate basepairing, while [.] indicates an unpaired nucleotide. For example, an 8 nt hairpin would be written as follows: AGGGGGGGGAAAACCCCCCCCA (SEQ ID NO: 91)
.<<<<<<<< . . . >>>>>>>>.
Where nt 8 pairs with nt 13 and so on
( ) indicate base-pairing through space, called a pseudoknot. So an 8 nt hairpin with a 4 nt pseudoknot would be written as

(SEQ ID NO: 92)
GGGGGGGGAAAACCCCCCCCAAAAATTTT
<<<<<<<<((((>>>>>>.....))))

Where nt 8 pairs with nt 13 and nt 9 pairs with nt 21

[0284] Given that the P0 region of the ribozyme will depend on the sequence of the target region in the R-loop of the target gene locus of the napDNAbp/guide RNA complex, the P0 region of the ribozyme can designed based on any given target DNA sequence. As such, the P0 sequence of ribozyme (iii) is represented with a string of Ns, representing any nucleotide sequence, as follows:

(SEQ ID NO: 156)
5'-
NNNNNNNNNNNNAAAAGTTATCAGGCATGCACCTGGTAGCTAGTCTTTAA
ACCAATAGATTGCATCGGTTTAAAAGGCAAGACCGTCAAATTGCGGGAAA
GGGGTCAACAGCCGTTCAGTACCAAGTCTCAGGGGAAACTTTGAGATGGC
CTTGCAAAGGGTATGGTAATAAGCTGACGGACATGGTCCTAACCACGCAG
CCAAGTCCTAAGTCAACAGATCTTCTGTTGATATGGATGCAGTTCACAGA
CTAAATGTCGGTCGGGGAAGATGTATTCTTCTCATAAGATATAGTCGGAC
CTCTCCTTAATGGGAGCTAGCGGATGAAGTGATGCAACACTGGAGCCGCT
GGGAACTAATTTGTATGCGAAAGTATATTGATTAGTTTTGGAGTA*-3',

or a ribozyme comprising a nucleotide sequence that is at least 85%, at least 90%, at least 91%, at least 92%, at least 93%, at least 94%, at least 95%, at least 96%, at least 97%, at least 98%, at least 99%, or at least 99.5% identical to the above sequence.

[0285] P0 (underlined), engineered to bind the targeted site and affect nucleotide ligation. This sequence region may be customized depending on the sequence of the target edit site.

[0286] * indicates deletion of 4 nt to prevent ribozyme insertion into DNA

[0287] Given that the P0 region of the ribozyme will depend on the sequence of the target region in the R-loop of the target gene locus of the napDNAbp/guide RNA complex, the P0 region of the ribozyme can designed based on any given target DNA sequence. As such, the P0 sequence of ribozyme (iv) is represented with a string of Ns, representing any nucleotide

(SEQ ID NO: 157)
NNNNNNNNAAAAGTTATCAGGCATACACCTGGAGAATAGCTAGTCTTTAA
ACCAATAGATTGCATCGGTTTAAAGGCTAGACCGTCAAATTGCGGGAATA
GGGTCAACAGCCGTTCAGTACCAAGTCTCAGGGGAAACTTTGAGATGGCA
TTGTAAAGGGTATGGTAATAAACATACGGACATGGTCCCAACCACGCAAC
CAAGTCCTAAGTCAACAGTTTTTCGTACACCATCAGGGTACGTTTTTCAG
ACACCATCAGGGTCTGTTTTTGGTACAGCATCAGCGTACCTTTTTCGTAC
AGGATCACCGTACGTTTTTCAGACAGGATCACCGTCTGTTTTTCTGTTGA
TATGGATGCAGTTCACAGACTAAATGTCGGTCGGGGAAGATGTATTCTTC
TCATAAGATATAGTCGCGCCTCTCCTTAATGGGAGCTAGCGGATGAAGTG
ATGCAACACTGGAGCCGCTGGGAACTAATTTGTATGCGAAAGTATATTGA
TTAGTTTTGGAGTA*,

or a ribozyme comprising a nucleotide sequence that is at least 85%, at least 90%, at least 91%, at least 92%, at least 93%, at least 94%, at least 95%, at least 96%, at least 97%, at least 98%, at least 99%, or at least 99.5% identical to the above sequence.

[0288] P0 (underlined), engineered to bind the targeted site and affect nucleotide ligation. This sequence region may be customized depending on the sequence of the target edit site.

[0289] MS2 aptamer sequence (bold, underlined)

[0290] * indicates deletion of 4 nt to prevent ribozyme insertion into DNA.

[0291] Ribozyme activity can be optimized as described by Stinchcomb et al., supra. The details will not be repeated here, but include altering the length of the ribozyme binding arms, or chemically synthesizing ribozymes with modifications that prevent their degradation by serum ribonucleases (see e.g., Eckstein et al., International Publication No. WO 92/07065; Perrault et al., Nature 1990, 344:565; Pieken et al., Science 1991, 253:314; Usman and Cedergren, Trends in Biochem. Sci. 1992, 17:334; Usman et al., International Publication No. WO 93/15187; and Rossi et al., International Publication No. WO 91/03162, as well as Usman, N. et al. U.S. patent application Ser. No. 07/829,729, and Sproat, B. European Patent Application 92110298.4 which describe various chemical modifications that can be made to the sugar moieties of enzymatic RNA molecules. All these publications are hereby incorporated by reference herein.

### [3] Recruitment Domains

[0292] In various embodiments, it will be advantageous to modify one or more components of the genome editing system described herein with targeting or recruitment domains, such as an RNA-protein recruitment system.

[0293] The genome editing system described herein may utilize RNA-protein recruitment systems to co-localize components of the editing system at a target DNA site (e.g., for achieving co-localization of napDNAbp/guide RNA complex with a ribozyme at a target DNA site).

[0294] Such recruitment systems generally combine an “RNA-protein interaction domain” coupled to a first interacting element (e.g., a ribozyme) with a cognate RNA-binding protein coupled to a second interacting element (e.g., a napDNAbp). The cognate RNA-binding protein binds to the RNA-protein interaction domain. In this way, one would be able to co-localize two separately expressed elements of the genome editing system, e.g., co-localization of ribozyme to a napDNAbp. These types of systems can be leveraged to recruit a variety of functionalities together within a cell, e.g., at a DNA editing target site.

[0295] An exemplary RNA-protein recruitment system is the MS2 tagging technique, which is based on the natural interaction of the MS2 bacteriophage coat protein (“MCP” or “MS2cp”) and the stem-loop or hairpin structure present in the genome of the phage, i.e., the “MS2 hairpin.” Thus, with MS2 tagging, as it could be applied in the instant disclosure, the napDNAbp could be modified as a fusion protein comprising MCP and the ribozyme could be modified with the MS2 hairpin (e.g., as a transcriptional fusion to the ribozyme sequence or engineered to occur within the ribozyme sequence). In operation, the napDNAbp-MCP fusion, once targeted to a DNA edit site by an appropriate guide RNA, would recruit the MS2-tagged ribozyme to the edit site.

[0296] A review of other RNA-protein recruitment systems are described in the art, for example, in Johansson et al., “RNA recognition by the MS2 phage coat protein,” Sem Virol., 1997, Vol. 8(3): 176-185; Delebecque et al., “Organization of intracellular reactions with rationally designed RNA assemblies,” Science, 2011, Vol. 333: 470-474; Mali et al., “Cas9 transcriptional activators for target specificity screening and paired nickases for cooperative genome engineering,” Nat. Biotechnol., 2013, Vol. 31: 833-838; and Zalatan et al., “Engineering complex synthetic transcriptional programs with CRISPR RNA scaffolds,” Cell, 2015, Vol. 160: 339-350, each of which are incorporated herein by reference in their entireties. Other systems include the PP7 hairpin, which specifically recruits the PCP protein, and the “com” hairpin, which specifically recruits the Com protein. See Zalatan et al.

[0297] The nucleotide sequence of the MS2 hairpin (or equivalently referred to as the “MS2 aptamer”) is: GCCAACATGAGGATCACCCATGTCTGCAGGGCC (SEQ ID NO: 93). This application is not intended to be limited in any way to any particular RNA-protein recruitment system and may include any available system and described in the art.

[0298] The amino acid sequence of the MCP or MS2cp is: GSASNFTQFVLVDNGGTGDVTVAPSNFANGVAEWISSNSRSQAYKVTCSVRQSSAQ NRKYTIKVEVPKVATQTVGGEELPVAGWRSYLNMELTIPIFATNSDCELIVKAMQGL LKDGNPIPSAIAANSGIY (SEQ ID NO: 94), or an amino acid sequence having at least 85%, at least 90%, at least 91%, at least 92%, at least 93%, at least 94%, at least 95%, at least 96%, at least 97%, at least 98%, at least 99%, or at least 99.5% sequence identity with SEQ ID NO: 94.

[0299] In other embodiments, the napDNAbp may be modified with one or more targeting domains that function to enhance the targeting of the ribozyme to the genomic locus bound by the napDNAbp, thereby increasing the efficiency of the ribozyme's enzymatic action at the desired target site. In addition, the ribozyme may also be engineered to comprise the corresponding structural feature that will interact with the one or more targeting domains.

[0300] Any suitable targeting domain may be incorporated into the napDNAbp as a fusion protein, and fused optionally via a linker. In addition, the targeting domain will either recognize a corresponding structural naturally occurring feature on the ribozyme or the ribozyme can be engineered to incorporated the corresponding structural feature which binds and/or interacts with the targeting domain.

[0301] In one embodiment, the napDNAbp may be fused to a bacteriophage coat protein. Without being bound by theory, the bacteriophage coat protein binds to an MS2 RNA hairpin sequence, which can be incorporated as a structure into the engineered ribozyme.

[0302] MS2 coat protein:

### NP_040648.1

[0303] GSASNFTQFVLVDNGGTGDVTVAPSNFANGVAEWISSNSRSQAYKVTCSVRQSSAQ NRKYTIKVEVPKVATQTVGGEELPVAGWRSYLNMELTIPIFATNSDCELIVKAMQGL LKDGNPIPSAIAANSGIY [SEQ ID NO: 94], or an amino acid sequence having at least 85%, at least 90%, at least 91%, at least 92%, at least 93%, at least 94%, at least 95%, at least 96%, at least 97%, at least 98%, at least 99%, or at least 99.5% sequence identity with SEQ ID NO: 94.

[0304] MS2 hairpin sequences: UCUCGUACACCAUCAGGGUACGUCUCAGACACCAUCAGGGUCUGUCUGGUACA GCAUCAGCGUACC [SEQ ID NO: 96], or a nucleotide sequence having at least 85%, at least 90%, at least 91%, at least 92%, at least 93%, at least 94%, at least 95%, at least 96%, at least 97%, at least 98%, at least 99%, or at least 99.5% sequence identity with SEQ ID NO: 96. UUUUUCGUACACCAUCAGGGUACGUUUUUCAGACACCAUCAGGGUCUGUUUU UGGUACAGCAUCAGCGUACCUUUUUCGUACAGGAUCACCGUACGUUUUUCAGA CAGGAUCACCGUCUGUUUUU [SEQ ID NO: 97], or a nucleotide sequence having at least 85%, at least 90%, at least 91%, at least 92%, at least 93%, at least 94%, at least 95%, at least 96%, at least 97%, at least 98%, at least 99%, or at least 99.5% sequence identity with SEQ ID NO: 97.

[0305] In addition, targeting moieties and cognate targeting moiety receptors could utilize protein-RNA binding pairs, RNA-RNA binding proteins, and RNA aptamers. Examples of such pairs include:

[0306] Hfq protein/RprA

Hfq:
[SEQ ID NO: 98]
MAKGQSLQDPFLNALRRERVPVSIYLVNGILQGQIESFDQFVILLKNTVS
QMVYKHAISTVVPSRPVSHHSNNAGGGTSSNYHHGSSAQNTSAQQDSEET
E
RprA:
[SEQ ID NO: 99]
ACGGUUAUAA AUCAACAUAU UGAUUUAUAA GCAUGGAAAU
CCCCUGAGUG AAACAACGAAUUGCUGUGUG UAGUCUUUGC
CCAUCUCCCA CGAUGGGCUU UUUUU

[0307] Reference: Zhang, Wassarman, Rosenow, Tjaden, Storz, Gottesman. Global analysis of small RNA and mRNA targets of Hfq. Molecular Microbiology 2003.

[0308] Streptavidin aptamer/streptavidin

Streptavidin aptamer:

[SEQ ID NO: 100]
ACCGACCAGAAUCAUGCAAGUGCGUAAGAUAGUCGCGGGCCGGG
Streptavidin:
[SEQ ID NO: 101]
MRKIVVAAIAVSLTTVSITASASADPSKDSKAQVSAAEAGITGTWYNQLG
STFIVTAGADGALTGTYESAVGNAESRYVLTGRYDSAPATDGSGTALGWT
VAWKNNYRNAHSATTWSGQYVGGAEARINTQWLLTSGTTEANAWKSTLVG
HDTFTKVKPSAASIDAAKKAGVNNGNPLDAVQQ.

[0309] Such targeting moieties and/or targeting moiety receptors, i.e., recruitment domains, may also include any nucleic acid sequence or amino acid sequences, as the case may be, having at least 85%, at least 90%, at least 91%, at least 92%, at least 93%, at least 94%, at least 95%, at least 96%, at least 97%, at least 98%, at least 99%, or at least 99.5% sequence identity to any of the above-mentioned sequences.

### [4] Linkers and Other Domains

[0310] The genome editing system described herein may comprise various other domains besides the napDNAbp (e.g., Cas9 domain) and the ribozymes. For example, in the case where the napDNAbp is fused to another functional domain (e.g., NLS or a recruitment domain), the fusions may comprise one or more linkers that join the Cas9 domain with the additional domain.

[0311] Linkers

[0312] As defined above, the term “linker,” as used herein, refers to a chemical group or a molecule linking two molecules or moieties, e.g., a binding domain and a cleavage domain of a nuclease. In some embodiments, a linker joins a gRNA binding domain of an RNA-programmable nuclease and the catalytic domain of a polymerase (e.g., a reverse transcriptase). In some embodiments, a linker joins a dCas9 and reverse transcriptase. Typically, the linker is positioned between, or flanked by, two groups, molecules, or other moieties and connected to each one via a covalent bond, thus connecting the two. In some embodiments, the linker is an amino acid or a plurality of amino acids (e.g., a peptide or protein). In some embodiments, the linker is an organic molecule, group, polymer, or chemical moiety. In some embodiments, the linker is 5-100 amino acids in length, for example, 5, 6, 7, 8, 9, 10, 11, 12, 13, 14, 15, 16, 17, 18, 19, 20, 21, 22, 23, 24, 25, 26, 27, 28, 29, 30, 30-35, 35-40, 40-45, 45-50, 50-60, 60-70, 70-80, 80-90, 90-100, 100-150, or 150-200 amino acids in length. Longer or shorter linkers are also contemplated.

[0313] The linker may be as simple as a covalent bond, or it may be a polymeric linker many atoms in length. In certain embodiments, the linker is a polypeptide or based on amino acids. In other embodiments, the linker is not peptide-like. In certain embodiments, the linker is a covalent bond (e.g., a carbon-carbon bond, disulfide bond, carbon-heteroatom bond, etc.). In certain embodiments, the linker is a carbon-nitrogen bond of an amide linkage. In certain embodiments, the linker is a cyclic or acyclic, substituted or unsubstituted, branched or unbranched aliphatic or heteroaliphatic linker. In certain embodiments, the linker is polymeric (e.g., polyethylene, polyethylene glycol, polyamide, polyester, etc.). In certain embodiments, the linker comprises a monomer, dimer, or polymer of aminoalkanoic acid. In certain embodiments, the linker comprises an aminoalkanoic acid (e.g., glycine, ethanoic acid, alanine, beta-alanine, 3-aminopropanoic acid, 4-aminobutanoic acid, 5-pentanoic acid, etc.). In certain embodiments, the linker comprises a monomer, dimer, or polymer of aminohexanoic acid (Ahx). In certain embodiments, the linker is based on a carbocyclic moiety (e.g., cyclopentane, cyclohexane). In other embodiments, the linker comprises a polyethylene glycol moiety (PEG). In other embodiments, the linker comprises amino acids. In certain embodiments, the linker comprises a peptide. In certain embodiments, the linker comprises an aryl or heteroaryl moiety. In certain embodiments, the linker is based on a phenyl ring. The linker may included funtionalized moieties to facilitate attachment of a nucleophile (e.g., thiol, amino) from the peptide to the linker. Any electrophile may be used as part of the linker. Exemplary electrophiles include, but are not limited to, activated esters, activated amides, Michael acceptors, alkyl halides, aryl halides, acyl halides, and isothiocyanates.

[0314] In some other embodiments, the linker comprises the amino acid sequence (GGGGS)N (SEQ ID NO: 102), (G)N (SEQ ID NO: 103), (EAAAK)N (SEQ ID NO: 104), (GGS)N (SEQ ID NO: 105), (SGGS)N (SEQ ID NO: 106), (XP)N (SEQ ID NO: 107), or any combination thereof, wherein n is independently an integer between 1 and 30, and wherein X is any amino acid. In some embodiments, the linker comprises the amino acid sequence (GGS)N (SEQ ID NO: 108), wherein n is 1, 3, or 7. In some embodiments, the linker comprises the amino acid sequence SGSETPGTSESATPES (SEQ ID NO: 109). In some embodiments, the linker comprises the amino acid sequence SGGSSGGSSGSETPGTSESATPESSGGSSGGS (SEQ ID NO: 110). In some embodiments, the linker comprises the amino acid sequence SGGSGGSGGS (SEQ ID NO: 111). In some embodiments, the linker comprises the amino acid sequence SGGS (SEQ ID NO: 112). In other embodiments, the linker comprises the amino acid sequence SGGSSGGSSGSETPGTSESATPESAGSYPYDVPDYAGSAAPAAKKKKLDGSGSGGSS GGS (SEQ ID NO: 113, 60AA).

[0315] In certain embodiments, linkers may be used to link any of the peptides or peptide domains or moieties of the invention (e.g., a napDNAbp linked or fused to a reverse transcriptase).

[0316] As defined above, the term “linker,” as used herein, refers to a chemical group or a molecule linking two molecules or moieties, e.g., a binding domain and a cleavage domain of a nuclease. In some embodiments, a linker joins a gRNA binding domain of an RNA-programmable nuclease and the catalytic domain of a recombinase. In some embodiments, a linker joins a dCas9 and reverse transcriptase. Typically, the linker is positioned between, or flanked by, two groups, molecules, or other moieties and connected to each one via a covalent bond, thus connecting the two. In some embodiments, the linker is an amino acid or a plurality of amino acids (e.g., a peptide or protein). In some embodiments, the linker is an organic molecule, group, polymer, or chemical moiety. In some embodiments, the linker is 5-100 amino acids in length, for example, 5, 6, 7, 8, 9, 10, 11, 12, 13, 14, 15, 16, 17, 18, 19, 20, 21, 22, 23, 24, 25, 26, 27, 28, 29, 30, 30-35, 35-40, 40-45, 45-50, 50-60, 60-70, 70-80, 80-90, 90-100, 100-150, or 150-200 amino acids in length. Longer or shorter linkers are also contemplated.

[0317] The linker may be as simple as a covalent bond, or it may be a polymeric linker many atoms in length. In certain embodiments, the linker is a polypeptide or based on amino acids. In other embodiments, the linker is not peptide-like. In certain embodiments, the linker is a covalent bond (e.g., a carbon-carbon bond, disulfide bond, carbon-heteroatom bond, etc.). In certain embodiments, the linker is a carbon-nitrogen bond of an amide linkage. In certain embodiments, the linker is a cyclic or acyclic, substituted or unsubstituted, branched or unbranched aliphatic or heteroaliphatic linker. In certain embodiments, the linker is polymeric (e.g., polyethylene, polyethylene glycol, polyamide, polyester, etc.). In certain embodiments, the linker comprises a monomer, dimer, or polymer of aminoalkanoic acid. In certain embodiments, the linker comprises an aminoalkanoic acid (e.g., glycine, ethanoic acid, alanine, beta-alanine, 3-aminopropanoic acid, 4-aminobutanoic acid, 5-pentanoic acid, etc.). In certain embodiments, the linker comprises a monomer, dimer, or polymer of aminoHEXAnoic acid (Ahx). In certain embodiments, the linker is based on a carbocyclic moiety (e.g., cyclopentane, cycloHEXAne). In other embodiments, the linker comprises a polyethylene glycol moiety (PEG). In other embodiments, the linker comprises amino acids. In certain embodiments, the linker comprises a peptide. In certain embodiments, the linker comprises an aryl or heteroaryl moiety. In certain embodiments, the linker is based on a phenyl ring. The linker may included funtionalized moieties to facilitate attachment of a nucleophile (e.g., thiol, amino) from the peptide to the linker. Any electrophile may be used as part of the linker. Exemplary electrophiles include, but are not limited to, activated esters, activated amides, Michael acceptors, alkyl halides, aryl halides, acyl halides, and isothiocyanates.

[0318] In some other embodiments, the linker comprises the amino acid sequence (GGGGS)N (SEQ ID NO: 102), (G)N (SEQ ID NO: 103), (EAAAK)N (SEQ ID NO: 104), (GGS)N (SEQ ID NO: 105), (SGGS)N (SEQ ID NO: 106), (XP)N (SEQ ID NO: 107), or any combination thereof, wherein n is independently an integer between 1 and 30, and wherein X is any amino acid. In some embodiments, the linker comprises the amino acid sequence (GGS)N (SEQ ID NO: 108), wherein n is 1, 3, or 7. In some embodiments, the linker comprises the amino acid sequence SGSETPGTSESATPES (SEQ ID NO: 109). In some embodiments, the linker comprises the amino acid sequence SGGSSGGSSGSETPGTSESATPESSGGSSGGS (SEQ ID NO: 110). In some embodiments, the linker comprises the amino acid sequence SGGSGGSGGS (SEQ ID NO: 111). In some embodiments, the linker comprises the amino acid sequence SGGS (SEQ ID NO: 112).

[0319] In particular, the following linkers can be used in various embodiments to join genome editing components with one another:

(SEQ ID NO: 114)
GGS;
(SEQ ID NO: 115)
GGSGGS;
(SEQ ID NO: 1156)
GGSGGSGGS;
(SEQ ID NO: 117)
SGGSSGGSSGSETPGTSESATPESSGGSSGGSS;
(SEQ ID NO: 109)
SGSETPGTSESATPES;
(SEQ ID NO: 113)
SGGSSGGSSGSETPGTSESATPESAGSYPYDVPDYAGSAAPAAKKKKLDG
SGSGGSSGGS.

[0320] Nuclear Localization Sequence (NLS)

[0321] In various embodiments, the genome editing system may comprise one or more nuclear localization sequences (NLS), which help promote translocation of a protein into the cell nucleus. Such sequences are well-known in the art and can include the following examples:

NLS OF SV40 LARGE T-AG:
(SEQ ID NO: 9)
PKKKRKV.
NLS:
(SEQ ID NO: 118)
MKRTADGSEFESPKKKRKV.
NLS:
(SEQ ID NO: 10)
MDSLLMNRRKFLYQFKNVRWAKGRRETYLC.
NLS OF NUCLEOPLASMIN:
(SEQ ID NO: 119)
AVKRPAATKKAGQAKKKKLD.
NLS OF EGL-13:
(SEQ ID NO: 120)
MSRRRKANPTKLSENAKKLAKEVEN.
NLS OF C-MYC:
(SEQ ID NO: 121)
PAAKRVKLD.
NLS OF TUS-PROTEIN:
(SEQ ID NO: 122)
KLKIKRPVK.
NLS OF POLYOMA LARGE T-AG:
(SEQ ID NO: 123)
VSRKRPRP.
NLS OF HEPATITIS D VIRUS ANTIGEN:
(SEQ ID NO: 124)
EGAPPAKRAR.
NLS OF MURINE P53:
(SEQ ID NO: 125)
PPQPKKKPLDGE.
NLS OF PE1 AND PE2:
(SEQ ID NO: 126)
SGGSKRTADGSEFEPKKKRKV.

[0322] The NLS examples above are non-limiting. The genome editing system may comprise any known NLS sequence, including any of those described in Cokol et al., “Finding nuclear localization signals,” EMBO Rep., 2000, 1(5): 411-415 and Freitas et al., “Mechanisms and Signals for the Nuclear Import of Proteins,” Current Genomics, 2009, 10(8): 550-7, each of which are incorporated herein by reference.

[0323] In various embodiments, the editors and constructs encoding the editors disclosed herein further comprise one or more, preferably, at least two nuclear localization signals. In certain embodiments, the genome editors comprise at least two NLSs. In embodiments with at least two NLSs, the NLSs can be the same NLSs or they can be different NLSs. In addition, the NLSs may be expressed as part of a fusion protein with the remaining portions of the genome editors. In some embodiments, one or more of the NLSs are bipartite NLSs (“bpNLS”). In certain embodiments, the disclosed fusion proteins comprise two bipartite NLSs. In some embodiments, the disclosed fusion proteins comprise more than two bipartite NLSs.

[0324] The location of the NLS fusion can be at the N-terminus, the C-terminus, or within a sequence of a genome editor (e.g., inserted between the encoded napDNAbp component (e.g., Cas9) and a polymerase domain (e.g., a reverse transcriptase domain).

[0325] The NLSs may be any known NLS sequence in the art. The NLSs may also be any future-discovered NLSs for nuclear localization. The NLSs also may be any naturally-occurring NLS, or any non-naturally occurring NLS (e.g., an NLS with one or more desired mutations).

[0326] The term “nuclear localization sequence” or “NLS” refers to an amino acid sequence that promotes import of a protein into the cell nucleus, for example, by nuclear transport. Nuclear localization sequences are known in the art and would be apparent to the skilled artisan. For example, NLS sequences are described in Plank et al., International PCT application PCT/EP2000/011690, filed Nov. 23, 2000, published as WO/2001/038547 on May 31, 2001, the contents of which are incorporated herein by reference. In some embodiments, an NLS comprises the amino acid sequence PKKKRKV (SEQ ID NO: 9), MDSLLMNRRKFLYQFKNVRWAKGRRETYLC (SEQ ID NO: 10), KRTADGSEFESPKKKRKV (SEQ ID NO: 127), or KRTADGSEFEPKKKRKV (SEQ ID NO: 128). In other embodiments, NLS comprises the amino acid sequences NLSKRPAAIKKAGQAKKKK (SEQ ID NO: 129), PAAKRVKLD (SEQ ID NO: 121), RQRRNELKRSF (SEQ ID NO: 130), NQSSNFGPMKGGNFGGRSSGPYGGGGQYFAKPRNQGGY (SEQ ID NO: 131).

[0327] In one aspect of the disclosure, a genome editing system may be modified with one or more nuclear localization signals (NLS), preferably at least two NLSs. In certain embodiments, the genome editing systems are modified with two or more NLSs. The disclosure contemplates the use of any nuclear localization signal known in the art at the time of the disclosure, or any nuclear localization signal that is identified or otherwise made available in the state of the art after the time of the instant filing. A representative nuclear localization signal is a peptide sequence that directs the protein to the nucleus of the cell in which the sequence is expressed. A nuclear localization signal is predominantly basic, can be positioned almost anywhere in a protein's amino acid sequence, generally comprises a short sequence of four amino acids (Autieri & Agrawal, (1998) J. Biol. Chem. 273: 14731-37, incorporated herein by reference) to eight amino acids, and is typically rich in lysine and arginine residues (Magin et al., (2000) Virology 274: 11-16, incorporated herein by reference). Nuclear localization signals often comprise proline residues. A variety of nuclear localization signals have been identified and have been used to effect transport of biological molecules from the cytoplasm to the nucleus of a cell. See, e.g., Tinland et al., (1992) Proc. Natl. Acad. Sci. U.S.A. 89:7442-46; Moede et al., (1999) FEBS Lett. 461:229-34, which is incorporated by reference. Translocation is currently thought to involve nuclear pore proteins.

[0328] Most NLSs can be classified in three general groups: (i) a monopartite NLS exemplified by the SV40 large T antigen NLS (PKKKRKV (SEQ ID NO: 9)); (ii) a bipartite motif consisting of two basic domains separated by a variable number of spacer amino acids and exemplified by the Xenopus nucleoplasmin NLS (KRXXXXXXXXXXKKKL (SEQ ID NO: 132)); and (iii) noncanonical sequences such as M9 of the hnRNP A1 protein, the influenza virus nucleoprotein NLS, and the yeast Gal4 protein NLS (Dingwall and Laskey 1991).

[0329] Nuclear localization signals appear at various points in the amino acid sequences of proteins. NLS's have been identified at the N-terminus, the C-terminus and in the central region of proteins. Thus, the disclosure provides genome editing systems that may be modified with one or more NLSs at the C-terminus, the N-terminus, as well as at in internal region of the genome editing system. The residues of a longer sequence that do not function as component NLS residues should be selected so as not to interfere, for example tonically or sterically, with the nuclear localization signal itself. Therefore, although there are no strict limits on the composition of an NLS-comprising sequence, in practice, such a sequence can be functionally limited in length and composition.

[0330] The present disclosure contemplates any suitable means by which to modify a genome editing system to include one or more NLSs. In one aspect, the genome editing systems may be engineered to express a genome editing system protein that is translationally fused at its N-terminus or its C-terminus (or both) to one or more NLSs, i.e., to form a genome editing system-NLS fusion construct. In other embodiments, the genome editing system-encoding nucleotide sequence may be genetically modified to incorporate a reading frame that encodes one or more NLSs in an internal region of the encoded genome editing system. In addition, the NLSs may include various amino acid linkers or spacer regions encoded between the genome editing system and the N-terminally, C-terminally, or internally-attached NLS amino acid sequence, e.g., and in the central region of proteins. Thus, the present disclosure also provides for nucleotide constructs, vectors, and host cells for expressing fusion proteins that comprise a genome editing system and one or more NLSs.

[0331] The genome editing systems described herein may also comprise nuclear localization signals which are linked to a genome editing system through one or more linkers, e.g., and polymeric, amino acid, nucleic acid, polysaccharide, chemical, or nucleic acid linker element. The linkers within the contemplated scope of the disclosure are not intended to have any limitations and can be any suitable type of molecule (e.g., polymer, amino acid, polysaccharide, nucleic acid, lipid, or any synthetic chemical linker domain) and be joined to the genome editing system by any suitable strategy that effectuates forming a bond (e.g., covalent linkage, hydrogen bonding) between the genome editing system and the one or more NLSs.

[0332] Inteins and Split-Inteins

[0333] It will be understood that in some embodiments (e.g., delivery of a genome editing system in vivo using AAV particles), it may be advantageous to split a polypeptide (e.g., a napDNAbp) or a fusion protein (e.g., a napDNAbp-NLS fusion) into an N-terminal half and a C-terminal half, delivery them separately, and then allow their colocalization to reform the complete protein (or fusion protein as the case may be) within the cell. Separate halves of a protein or a fusion protein may each comprise a split-intein tag to facilitate the reformation of the complete protein or fusion protein by the mechanism of protein trans splicing.

[0334] Protein trans-splicing, catalyzed by split inteins, provides an entirely enzymatic method for protein ligation. A split-intein is essentially a contiguous intein (e.g. a mini-intein) split into two pieces named N-intein and C-intein, respectively. The N-intein and C-intein of a split intein can associate non-covalently to form an active intein and catalyze the splicing reaction essentially in same way as a contiguous intein does. Split inteins have been found in nature and also engineered in laboratories. As used herein, the term “split intein” refers to any intein in which one or more peptide bond breaks exists between the N-terminal and C-terminal amino acid sequences such that the N-terminal and C-terminal sequences become separate molecules that can non-covalently reassociate, or reconstitute, into an intein that is functional for trans-splicing reactions. Any catalytically active intein, or fragment thereof, may be used to derive a split intein for use in the methods of the invention. For example, in one aspect the split intein may be derived from a eukaryotic intein. In another aspect, the split intein may be derived from a bacterial intein. In another aspect, the split intein may be derived from an archaeal intein. Preferably, the split intein so-derived will possess only the amino acid sequences essential for catalyzing trans-splicing reactions.

[0335] As used herein, the “N-terminal split intein (In)” refers to any intein sequence that comprises an N-terminal amino acid sequence that is functional for trans-splicing reactions. An In thus also comprises a sequence that is spliced out when trans-splicing occurs. An In can comprise a sequence that is a modification of the N-terminal portion of a naturally occurring intein sequence. For example, an In can comprise additional amino acid residues and/or mutated residues so long as the inclusion of such additional and/or mutated residues does not render the In non-functional in trans-splicing. Preferably, the inclusion of the additional and/or mutated residues improves or enhances the trans-splicing activity of the In.

[0336] As used herein, the “C-terminal split intein (Ic)” refers to any intein sequence that comprises a C-terminal amino acid sequence that is functional for trans-splicing reactions. In one aspect, the Ic comprises 4 to 7 contiguous amino acid residues, at least 4 amino acids of which are from the last β-strand of the intein from which it was derived. An Ic thus also comprises a sequence that is spliced out when trans-splicing occurs. An Ic can comprise a sequence that is a modification of the C-terminal portion of a naturally occurring intein sequence. For example, an Ic can comprise additional amino acid residues and/or mutated residues so long as the inclusion of such additional and/or mutated residues does not render the In non-functional in trans-splicing. Preferably, the inclusion of the additional and/or mutated residues improves or enhances the trans-splicing activity of the Ic.

[0337] In some embodiments of the invention, a peptide linked to an Ic or an In can comprise an additional chemical moiety including, among others, fluorescence groups, biotin, polyethylene glycol (PEG), amino acid analogs, unnatural amino acids, phosphate groups, glycosyl groups, radioisotope labels, and pharmaceutical molecules. In other embodiments, a peptide linked to an Ic can comprise one or more chemically reactive groups including, among others, ketone, aldehyde, Cys residues and Lys residues. The N-intein and C-intein of a split intein can associate non-covalently to form an active intein and catalyze the splicing reaction when an “intein-splicing polypeptide (ISP)” is present. As used herein, “intein-splicing polypeptide (ISP)” refers to the portion of the amino acid sequence of a split intein that remains when the Ic, In, or both, are removed from the split intein. In certain embodiments, the In comprises the ISP. In another embodiment, the Ic comprises the ISP. In yet another embodiment, the ISP is a separate peptide that is not covalently linked to In nor to Ic.

[0338] Split inteins may be created from contiguous inteins by engineering one or more split sites in the unstructured loop or intervening amino acid sequence between the −12 conserved beta-strands found in the structure of mini-inteins. Some flexibility in the position of the split site within regions between the beta-strands may exist, provided that creation of the split will not disrupt the structure of the intein, the structured beta-strands in particular, to a sufficient degree that protein splicing activity is lost.

[0339] In protein trans-splicing, one precursor protein consists of an N-extein part followed by the N-intein, another precursor protein consists of the C-intein followed by a C-extein part, and a trans-splicing reaction (catalyzed by the N- and C-inteins together) excises the two intein sequences and links the two extein sequences with a peptide bond. Protein trans-splicing, being an enzymatic reaction, can work with very low (e.g. micromolar) concentrations of proteins and can be carried out under physiological conditions.

[0340] Exemplary Sequences are as Follows:

2-4 INTEIN:
(SEQ ID NO: 1)
CLAEGTRIFDPVTGTTHRIEDVVDGRKPIHVVAAAKDGTLLARPVVSWFD
QGTRDVIGLRIAGGAIVWATPDHKVLTEYGWRAAGELRKGDRVAGPGGSG
NSLALSLTADQMVSALLDAEPPILYSEYDPTSPFSEASMMGLLTNLADRE
LVHMINWAKRVPGFVDLTLHDQAHLLECAWLEILMIGLVWRSMEHPGKLL
FAPNLLLDRNQGKCVEGMVETDMLLATSSRFRMMNLQGEEFVCLKSIILL
NSGVYTFLSSTLKSLEEKDHIHRALDKITDTLIHLMAKAGLTLQQQHQRL
AQLLLILSHIRHMSNKGMEHLYSMKYKNVVPLYDLLLEMLDAHRLHAGGS
GASRVQAFADALDDKFLHDMLAEELRYSVIREVLPTRRARTFDLEVEELH
TLVAEGVVVHNC
3-2 INTEIN
(SEQ ID NO: 2)
CLAEGTRIFDPVTGTTHRIEDVVDGRKPIHVVAVAKDGTLLARPVVSWFD
QGTRDVIGLRIAGGAIVWATPDHKVLTEYGWRAAGELRKGDRVAGPGGSG
NSLALSLTADQMVSALLDAEPPILYSEYDPTSPFSEASMMGLLTNLADRE
LVHMINWAKRVPGFVDLTLHDQAHLLECAWLEILMIGLVWRSMEHPGKLL
FAPNLLLDRNQGKCVEGMVETDMLLATSSRFRMMNLQGEEFVCLKSIILL
NSGVYTFLSSTLKSLEEKDHIHRALDKITDTLIHLMAKAGLTLQQQHQRL
AQLLLILSHIRHMSNKGMEHLYSMKYTNVVPLYDLLLEMLDAHRLHAGGS
GASRVQAFADALDDKFLHDMLAEELRYSVIREVLPTRRARTFDLEVEELH
TLVAEGVVVHNC
30R3-1 INTEIN
(SEQ ID NO: 3)
CLAEGTRIFDPVTGTTHRIEDVVDGRKPIHVVAAAKDGTLLARPVVSWFD
QGTRDVIGLRIAGGATVWATPDHKVLTEYGWRAAGELRKGDRVAGPGGSG
NSLALSLTADQMVSALLDAEPPIPYSEYDPTSPFSEASMMGLLTNLADRE
LVHMINWAKRVPGFVDLTLHDQAHLLECAWLEILMIGLVWRSMEHPGKLL
FAPNLLLDRNQGKCVEGMVETDMLLATSSRFRMMNLQGEEFVCLKSIILL
NSGVYTFLSSTLKSLEEKDHIHRALDKITDTLIHLMAKAGLTLQQQHQRL
AQLLLILSHIRHMSNKGMEHLYSMKYKNVVPLYDLLLEMLDAHRLHAGGS
GASRVQAFADALDDKFLHDMLAEGLRYSVIREVLPTRRARTFDLEVEELH
TLVAEGVVVHNC
30R3-2
(SEQ ID NO: 4)
INTEINCLAEGTRIFDPVTGTTHRIEDVVDGRKPIHVVAAAKDGTLLARP
VVSWFDQGTRDVIGLRIAGGATVWATPDHKVLTEYGWRAAGELRKGDRVA
GPGGSGNSLALSLTADQMVSALLDAEPPILYSEYDPTSPFSEASMMGLLT
NLADRELVHMINWAKRVPGFVDLTLHDQAHLLECAWLEILMIGLVWRSME
HPGKLLFAPNLLLDRNQGKCVEGMVEIFDMLLATSSRFRMMNLQGEEFVC
LKSIILLNSGVYTFLSSTLKSLEEKDHIHRALDKITDTLIHLMAKAGLTL
QQQHQRLAQLLLILSHIRHMSNKGMEHLYSMKYKNVVPLYDLLLEMLDAH
RLHAGGSGASRVQAFADALDDKFLHDMLAEELRYSVIREVLPTRRARTFD
LEVEELHTLVAEGVVVHNC
30R3-3 INTEIN
(SEQ ID NO: 5)
CLAEGTRIFDPVTGTTHRIEDVVDGRKPIHVVAAAKDGTLLARPVVSWFD
QGTRDVIGLRIAGGATVWATPDHKVLTEYGWRAAGELRKGDRVAGPGGSG
NSLALSLTADQMVSALLDAEPPIPYSEYDPTSPFSEASMMGLLTNLADRE
LVHMINWAKRVPGFVDLTLHDQAHLLECAWLEILMIGLVWRSMEHPGKLL
FAPNLLLDRNQGKCVEGMVETDMLLATSSRFRMMNLQGEEFVCLKSIILL
NSGVYTFLSSTLKSLEEKDHIHRALDKITDTLIHLMAKAGLTLQQQHQRL
AQLLLILSHIRHMSNKGMEHLYSMKYKNVVPLYDLLLEMLDAHRLHAGGS
GASRVQAFADALDDKFLHDMLAEELRYSVIREVLPTRRARTFDLEVEELH
TLVAEGVVVHNC
37R3-1 INTEIN
((SEQ ID NO: 6)
CLAEGTRIFDPVTGTTHRIEDVVDGRKPIHVVAAAKDGTLLARPVVSWFD
QGTRDVIGLRIAGGATVWATPDHKVLTEYGWRAAGELRKGDRVAGPGGSG
NSLALSLTADQMVSALLDAEPPILYSEYNPTSPFSEASMMGLLTNLADRE
LVHMINWAKRVPGFVDLTLHDQAHLLERAWLEILMIGLVWRSMEHPGKLL
FAPNLLLDRNQGKCVEGMVETDMLLATSSRFRMMNLQGEEFVCLKSIILL
NSGVYTFLSSTLKSLEEKDHIHRALDKITDTLIHLMAKAGLTLQQQHQRL
AQLLLILSHIRHMSNKGMEHLYSMKYKNVVPLYDLLLEMLDAHRLHAGGS
GASRVQAFADALDDKFLHDMLAEGLRYSVIREVLPTRRARTFDLEVEELH
TLVAEGVVVHNC
37R3-2 INTEIN
(SEQ ID NO: 7)
CLAEGTRIFDPVTGTTHRIEDVVDGRKPIHVVAAAKDGTLLARPVVSWFD
QGTRDVIGLRIAGGAIVWATPDHKVLTEYGWRAAGELRKGDRVAGPGGSG
NSLALSLTADQMVSALLDAEPPILYSEYDPTSPFSEASMMGLLTNLADRE
LVHMINWAKRVPGFVDLTLHDQAHLLERAWLEILMIGLVWRSMEHPGKLL
FAPNLLLDRNQGKCVEGMVETDMLLATSSRFRMMNLQGEEFVCLKSIILL
NSGVYTFLSSTLKSLEEKDHIHRALDKITDTLIHLMAKAGLTLQQQHQRL
AQLLLILSHIRHMSNKGMEHLYSMKYKNVVPLYDLLLEMLDAHRLHAGGS
GASRVQAFADALDDKFLHDMLAEGLRYSVIREVLPTRRARTFDLEVEELH
TLVAEGVVVHNC
37R3-3 INTEIN
(SEQ ID NO: 8)
CLAEGTRIFDPVTGTTHRIEDVVDGRKPIHVVAVAKDGTLLARPVVSWFD
QGTRDVIGLRIAGGATVWATPDHKVLTEYGWRAAGELRKGDRVAGPGGSG
NSLALSLTADQMVSALLDAEPPILYSEYDPTSPFSEASMMGLLTNLADRE
LVHMINWAKRVPGFVDLTLHDQAHLLERAWLEILMIGLVWRSMEHPGKLL
FAPNLLLDRNQGKCVEGMVETDMLLATSSRFRMMNLQGEEFVCLKSIILL
NSGVYTFLSSTLKSLEEKDHIHRALDKITDTLIHLMAKAGLTLQQQHQRL
AQLLLILSHIRHMSNKGMEHLYSMKYKNVVPLYDLLLEMLDAHRLHAGGS
GASRVQAFADALDDKFLHDMLAEELRYSVIREVLPTRRARTFDLEVEELH
TLVAEGVVVHNC

[0341] Although inteins are most frequently found as a contiguous domain, some exist in a naturally split form. In this case, the two fragments are expressed as separate polypeptides and must associate before splicing takes place, so-called protein trans-splicing.

[0342] An exemplary split intein is the Ssp DnaE intein, which comprises two subunits, namely, DnaE-N and DnaE-C. The two different subunits are encoded by separate genes, namely dnaE-n and dnaE-c, which encode the DnaE-N and DnaE-C subunits, respectively. DnaE is a naturally occurring split intein in Synechocytis sp. PCC6803 and is capable of directing trans-splicing of two separate proteins, each comprising a fusion with either DnaE-N or DnaE-C.

[0343] Additional naturally occurring or engineered split-intein sequences are known in the or can be made from whole-intein sequences described herein or those available in the art. Examples of split-intein sequences can be found in Stevens et al., “A promiscuous split intein with expanded protein engineering applications,” PNAS, 2017, Vol. 114: 8538-8543; Iwai et al., “Highly efficient protein trans-splicing by a naturally split DnaE intein from Nostc punctiforme, FEBS Lett, 580: 1853-1858, each of which are incorporated herein by reference. Additional split intein sequences can be found, for example, in WO 2013/045632, WO 2014/055782, WO 2016/069774, and EP2877490, the contents each of which are incorporated herein by reference.

[0344] In addition, protein splicing in trans has been described in vivo and in vitro (Shingledecker, et al., Gene 207:187 (1998), Southworth, et al., EMBO J. 17:918 (1998); Mills, et al., Proc. Natl. Acad. Sci. USA, 95:3543-3548 (1998); Lew, et al., J. Biol. Chem., 273:15887-15890 (1998); Wu, et al., Biochim. Biophys. Acta 35732:1 (1998b), Yamazaki, et al., J. Am. Chem. Soc. 120:5591 (1998), Evans, et al., J. Biol. Chem. 275:9091 (2000); Otomo, et al., Biochemistry 38:16040-16044 (1999); Otomo, et al., J. Biolmol. NMR 14:105-114 (1999); Scott, et al., Proc. Natl. Acad. Sci. USA 96:13638-13643 (1999)) and provides the opportunity to express a protein as to two inactive fragments that subsequently undergo ligation to form a functional product, e.g., as shown in FIGS. 66 and 67 with regard to the formation of a complete PE fusion protein from two separately-expressed halves.

[5] Methods of treatment

[0345] The instant disclosure provides methods for the treatment of a subject diagnosed with a disease associated with or caused by a point mutation or a frameshift mutation that can be corrected by the ribozyme-directed programmable editing system provided herein. For example, in some embodiments, a method is provided that comprises administering to a subject having such a disease, e.g., a cancer associated with a point mutation as described above, an effective amount of the ribozyme-directed programmable editing system described herein that corrects a frameshift mutation. In some embodiments, a method is provided that comprises administering to a subject having such a disease, e.g., a cancer associated with a point mutation as described above, an effective amount of the ribozyme-directed programmable editing system described herein that corrects a frameshift mutation in a disease-associated gene. In some embodiments, the disease is a proliferative disease. In some embodiments, the disease is a genetic disease. In some embodiments, the disease is a neoplastic disease. In some embodiments, the disease is a metabolic disease. In some embodiments, the disease is a lysosomal storage disease. Other diseases that can be treated by correcting a frameshift mutation (or other mutation involving a single nucleotide insertion or deletion) will be known to those of skill in the art, and the disclosure is not limited in this respect.

[0346] The instant disclosure provides methods for the treatment of additional diseases or disorders, e.g., diseases or disorders that are associated or caused by a point mutation that can be corrected by ribozyme-directed programmable editing. Some such diseases are described herein, and additional suitable diseases that can be treated with the strategies and fusion proteins provided herein will be apparent to those of skill in the art based on the instant disclosure. Exemplary suitable diseases and disorders are listed below. It will be understood that the numbering of the specific positions or residues in the respective sequences depends on the particular protein and numbering scheme used. Numbering might be different, e.g., in precursors of a mature protein and the mature protein itself, and differences in sequences from species to species may affect numbering. One of skill in the art will be able to identify the respective residue in any homologous protein and in the respective encoding nucleic acid by methods well known in the art, e.g., by sequence alignment and determination of homologous residues. Exemplary suitable diseases and disorders include, without limitation: 2-methyl-3-hydroxybutyric aciduria; 3 beta-Hydroxysteroid dehydrogenase deficiency; 3-Methylglutaconic aciduria; 3-Oxo-5 alpha-steroid delta 4-dehydrogenase deficiency; 46,XY sex reversal, type 1, 3, and 5; 5-Oxoprolinase deficiency; 6-pyruvoyl-tetrahydropterin synthase deficiency; Aarskog syndrome; Aase syndrome; Achondrogenesis type 2; Achromatopsia 2 and 7; Acquired long QT syndrome; Acrocallosal syndrome, Schinzel type; Acrocapitofemoral dysplasia; Acrodysostosis 2, with or without hormone resistance; Acroerythrokeratoderma; Acromicric dysplasia; Acth-independent macronodular adrenal hyperplasia 2; Activated PI3K-delta syndrome; Acute intermittent porphyria; deficiency of Acyl-CoA dehydrogenase family, member 9; Adams-Oliver syndrome 5 and 6; Adenine phosphoribosyltransferase deficiency; Adenylate kinase deficiency; hemolytic anemia due to Adenylosuccinate lyase deficiency; Adolescent nephronophthisis; Renal-hepatic-pancreatic dysplasia; Meckel syndrome type 7; Adrenoleukodystrophy; Adult junctional epidermolysis bullosa; Epidermolysis bullosa, junctional, localisata variant; Adult neuronal ceroid lipofuscinosis; Adult neuronal ceroid lipofuscinosis; Adult onset ataxia with oculomotor apraxia; ADULT syndrome; Afibrinogenemia and congenital Afibrinogenemia; autosomal recessive Agammaglobulinemia 2; Age-related macular degeneration 3, 6, 11, and 12; Aicardi Goutieres syndromes 1, 4, and 5; Chilbain lupus 1; Alagille syndromes 1 and 2; Alexander disease; Alkaptonuria; Allan-Herndon-Dudley syndrome; Alopecia universalis congenital; Alpers encephalopathy; Alpha-1-antitrypsin deficiency; autosomal dominant, autosomal recessive, and X-linked recessive Alport syndromes; Alzheimer disease, familial, 3, with spastic paraparesis and apraxia; Alzheimer disease, types, 1, 3, and 4; hypocalcification type and hypomaturation type, IIA1 Amelogenesis imperfecta; Aminoacylase 1 deficiency; Amish infantile epilepsy syndrome; Amyloidogenic transthyretin amyloidosis; Amyloid Cardiomyopathy, Transthyretin-related; Cardiomyopathy; Amyotrophic lateral sclerosis types 1, 6, 15 (with or without frontotemporal dementia), 22 (with or without frontotemporal dementia), and 10; Frontotemporal dementia with TDP43 inclusions, TARDBP-related; Andermann syndrome; Andersen Tawil syndrome; Congenital long QT syndrome; Anemia, nonspherocytic hemolytic, due to G6PD deficiency; Angelman syndrome; Severe neonatal-onset encephalopathy with microcephaly; susceptibility to Autism, X-linked 3; Angiopathy, hereditary, with nephropathy, aneurysms, and muscle cramps; Angiotensin i-converting enzyme, benign serum increase; Aniridia, cerebellar ataxia, and mental retardation; Anonychia; Antithrombin III deficiency; Antley-Bixler syndrome with genital anomalies and disordered steroidogenesis; Aortic aneurysm, familial thoracic 4, 6, and 9; Thoracic aortic aneurysms and aortic dissections; Multisystemic smooth muscle dysfunction syndrome; Moyamoya disease 5; Aplastic anemia; Apparent mineralocorticoid excess; Arginase deficiency; Argininosuccinate lyase deficiency; Aromatase deficiency; Arrhythmogenic right ventricular cardiomyopathy types 5, 8, and 10; Primary familial hypertrophic cardiomyopathy; Arthrogryposis multiplex congenita, distal, X-linked; Arthrogryposis renal dysfunction cholestasis syndrome; Arthrogryposis, renal dysfunction, and cholestasis 2; Asparagine synthetase deficiency; Abnormality of neuronal migration; Ataxia with vitamin E deficiency; Ataxia, sensory, autosomal dominant; Ataxia-telangiectasia syndrome; Hereditary cancer-predisposing syndrome; Atransferrinemia; Atrial fibrillation, familial, 11, 12, 13, and 16; Atrial septal defects 2, 4, and 7 (with or without atrioventricular conduction defects); Atrial standstill 2; Atrioventricular septal defect 4; Atrophia bulborum hereditaria; ATR-X syndrome; Auriculocondylar syndrome 2; Autoimmune disease, multisystem, infantile-onset; Autoimmune lymphoproliferative syndrome, type 1a; Autosomal dominant hypohidrotic ectodermal dysplasia; Autosomal dominant progressive external ophthalmoplegia with mitochondrial DNA deletions 1 and 3; Autosomal dominant torsion dystonia 4; Autosomal recessive centronuclear myopathy; Autosomal recessive congenital ichthyosis 1, 2, 3, 4A, and 4B; Autosomal recessive cutis laxa type IA and 1B; Autosomal recessive hypohidrotic ectodermal dysplasia syndrome; Ectodermal dysplasia 11b; hypohidrotic/hair/tooth type, autosomal recessive; Autosomal recessive hypophosphatemic bone disease; Axenfeld-Rieger syndrome type 3; Bainbridge-Ropers syndrome; Bannayan-Riley-Ruvalcaba syndrome; PTEN hamartoma tumor syndrome; Baraitser-Winter syndromes 1 and 2; Barakat syndrome; Bardet-Biedl syndromes 1, 11, 16, and 19; Bare lymphocyte syndrome type 2, complementation group E; Bartter syndrome antenatal type 2; Bartter syndrome types 3, 3 with hypocalciuria, and 4; Basal ganglia calcification, idiopathic, 4; Beaded hair; Benign familial hematuria; Benign familial neonatal seizures 1 and 2; Seizures, benign familial neonatal, 1, and/or myokymia; Seizures, Early infantile epileptic encephalopathy 7; Benign familial neonatal-infantile seizures; Benign hereditary chorea; Benign scapuloperoneal muscular dystrophy with cardiomyopathy; Bernard-Soulier syndrome, types A1 and A2 (autosomal dominant); Bestrophinopathy, autosomal recessive; beta Thalassemia; Bethlem myopathy and Bethlem myopathy 2; Bietti crystalline corneoretinal dystrophy; Bile acid synthesis defect, congenital, 2; Biotinidase deficiency; Birk Barel mental retardation dysmorphism syndrome; Blepharophimosis, ptosis, and epicanthus inversus; Bloom syndrome; Borjeson-Forssman-Lehmann syndrome; Boucher Neuhauser syndrome; Brachydactyly types A1 and A2; Brachydactyly with hypertension; Brain small vessel disease with hemorrhage; Branched-chain ketoacid dehydrogenase kinase deficiency; Branchiootic syndromes 2 and 3; Breast cancer, early-onset; Breast-ovarian cancer, familial 1, 2, and 4; Brittle cornea syndrome 2; Brody myopathy; Bronchiectasis with or without elevated sweat chloride 3; Brown-Vialetto-Van laere syndrome and Brown-Vialetto-Van Laere syndrome 2; Brugada syndrome; Brugada syndrome 1; Ventricular fibrillation; Paroxysmal familial ventricular fibrillation; Brugada syndrome and Brugada syndrome 4; Long QT syndrome; Sudden cardiac death; Bull eye macular dystrophy; Stargardt disease 4; Cone-rod dystrophy 12; Bullous ichthyosiform erythroderma; Burn-Mckeown syndrome; Candidiasis, familial, 2, 5, 6, and 8; Carbohydrate-deficient glycoprotein syndrome type I and II; Carbonic anhydrase VA deficiency, hyperammonemia due to; Carcinoma of colon; Cardiac arrhythmia; Long QT syndrome, LQT1 subtype; Cardioencephalomyopathy, fatal infantile, due to cytochrome c oxidase deficiency; Cardiofaciocutaneous syndrome; Cardiomyopathy; Danon disease; Hypertrophic cardiomyopathy; Left ventricular noncompaction cardiomyopathy; Carnevale syndrome; Carney complex, type 1; Carnitine acylcarnitine translocase deficiency; Carnitine palmitoyltransferase I, II, II (late onset), and II (infantile) deficiency; Cataract 1, 4, autosomal dominant, autosomal dominant, multiple types, with microcornea, coppock-like, juvenile, with microcornea and glucosuria, and nuclear diffuse nonprogressive; Catecholaminergic polymorphic ventricular tachycardia; Caudal regression syndrome; Cd8 deficiency, familial; Central core disease; Centromeric instability of chromosomes 1,9 and 16 and immunodeficiency; Cerebellar ataxia infantile with progressive external ophthalmoplegi and Cerebellar ataxia, mental retardation, and dysequilibrium syndrome 2; Cerebral amyloid angiopathy, APP-related; Cerebral autosomal dominant and recessive arteriopathy with subcortical infarcts and leukoencephalopathy; Cerebral cavernous malformations 2; Cerebrooculofacioskeletal syndrome 2; Cerebro-oculo-facio-skeletal syndrome; Cerebroretinal microangiopathy with calcifications and cysts; Ceroid lipofuscinosis neuronal 2, 6, 7, and 10; Chxc3xa9diak-Higashi syndrome, Chediak-Higashi syndrome, adult type; Charcot-Marie-Tooth disease types 1B, 2B2, 2C, 2F, 2I, 2U (axonal), 1C (demyelinating), dominant intermediate C, recessive intermediate A, 2A2, 4C, 4D, 4H, IF, IVF, and X; Scapuloperoneal spinal muscular atrophy; Distal spinal muscular atrophy, congenital nonprogressive; Spinal muscular atrophy, distal, autosomal recessive, 5; CHARGE association; Childhood hypophosphatasia; Adult hypophosphatasia; Cholecystitis; Progressive familial intrahepatic cholestasis 3; Cholestasis, intrahepatic, of pregnancy 3; Cholestanol storage disease; Cholesterol monooxygenase (side-chain cleaving) deficiency; Chondrodysplasia Blomstrand type; Chondrodysplasia punctata 1, X-linked recessive and 2 X-linked dominant; CHOPS syndrome; Chronic granulomatous disease, autosomal recessive cytochrome b-positive, types 1 and 2; Chudley-McCullough syndrome; Ciliary dyskinesia, primary, 7, 11, 15, 20 and 22; Citrullinemia type I; Citrullinemia type I and II; Cleidocranial dysostosis; C-like syndrome; Cockayne syndrome type A; Coenzyme Q10 deficiency, primary 1, 4, and 7; Coffin Siris/Intellectual Disability; Coffin-Lowry syndrome; Cohen syndrome; Cold-induced sweating syndrome 1; COLE-CARPENTER SYNDROME 2; Combined cellular and humoral immune defects with granulomas; Combined d-2- and 1-2-hydroxyglutaric aciduria; Combined malonic and methylmalonic aciduria; Combined oxidative phosphorylation deficiencies 1, 3, 4, 12, 15, and 25; Combined partial and complete 17-alpha-hydroxylase/17,20-lyase deficiency; Common variable immunodeficiency 9; Complement component 4, partial deficiency of, due to dysfunctional c1 inhibitor; Complement factor B deficiency; Cone monochromatism; Cone-rod dystrophy 2 and 6; Cone-rod dystrophy amelogenesis imperfecta; Congenital adrenal hyperplasia and Congenital adrenal hypoplasia, X-linked; Congenital amegakaryocytic thrombocytopenia; Congenital aniridia; Congenital central hypoventilation; Hirschsprung disease 3; Congenital contractural arachnodactyly; Congenital contractures of the limbs and face, hypotonia, and developmental delay; Congenital disorder of glycosylation types 1B, 1D, 1G, 1H, 1J, 1K, 1N, 1P, 2C, 2J, 2K, IIm; Congenital dyserythropoietic anemia, type I and II; Congenital ectodermal dysplasia of face; Congenital erythropoietic porphyria; Congenital generalized lipodystrophy type 2; Congenital heart disease, multiple types, 2; Congenital heart disease; Interrupted aortic arch; Congenital lipomatous overgrowth, vascular malformations, and epidermal nevi; Non-small cell lung cancer; Neoplasm of ovary; Cardiac conduction defect, nonspecific; Congenital microvillous atrophy; Congenital muscular dystrophy; Congenital muscular dystrophy due to partial LAMA2 deficiency; Congenital muscular dystrophy-dystroglycanopathy with brain and eye anomalies, types A2, A7, A8, A11, and A14; Congenital muscular dystrophy-dystroglycanopathy with mental retardation, types B2, B3, B5, and B15; Congenital muscular dystrophy-dystroglycanopathy without mental retardation, type B5; Congenital muscular hypertrophy-cerebral syndrome; Congenital myasthenic syndrome, acetazolamide-responsive; Congenital myopathy with fiber type disproportion; Congenital ocular coloboma; Congenital stationary night blindness, type 1A, 1B, 1C, 1E, 1F, and 2A; Coproporphyria; Cornea plana 2; Corneal dystrophy, Fuchs endothelial, 4; Corneal endothelial dystrophy type 2; Corneal fragility keratoglobus, blue sclerae and joint hypermobility; Cornelia de Lange syndromes 1 and 5; Coronary artery disease, autosomal dominant 2; Coronary heart disease; Hyperalphalipoproteinemia 2; Cortical dysplasia, complex, with other brain malformations 5 and 6; Cortical malformations, occipital; Corticosteroid-binding globulin deficiency; Corticosterone methyloxidase type 2 deficiency; Costello syndrome; Cowden syndrome 1; Coxa plana; Craniodiaphyseal dysplasia, autosomal dominant; Craniosynostosis 1 and 4; Craniosynostosis and dental anomalies; Creatine deficiency, X-linked; Crouzon syndrome; Cryptophthalmos syndrome; Cryptorchidism, unilateral or bilateral; Cushing symphalangism; Cutaneous malignant melanoma 1; Cutis laxa with osteodystrophy and with severe pulmonary, gastrointestinal, and urinary abnormalities; Cyanosis, transient neonatal and atypical nephropathic; Cystic fibrosis; Cystinuria; Cytochrome c oxidase i deficiency; Cytochrome-c oxidase deficiency; D-2-hydroxyglutaric aciduria 2; Darier disease, segmental; Deafness with labyrinthine aplasia microtia and microdontia (LAMM); Deafness, autosomal dominant 3a, 4, 12, 13, 15, autosomal dominant nonsyndromic sensorineural 17, 20, and 65; Deafness, autosomal recessive 1A, 2, 3, 6, 8, 9, 12, 15, 16, 18b, 22, 28, 31, 44, 49, 63, 77, 86, and 89; Deafness, cochlear, with myopia and intellectual impairment, without vestibular involvement, autosomal dominant, X-linked 2; Deficiency of 2-methylbutyryl-CoA dehydrogenase; Deficiency of 3-hydroxyacyl-CoA dehydrogenase; Deficiency of alpha-mannosidase; Deficiency of aromatic-L-amino-acid decarboxylase; Deficiency of bisphosphoglycerate mutase; Deficiency of butyryl-CoA dehydrogenase; Deficiency of ferroxidase; Deficiency of galactokinase; Deficiency of guanidinoacetate methyltransferase; Deficiency of hyaluronoglucosaminidase; Deficiency of ribose-5-phosphate isomerase; Deficiency of steroid 11-beta-monooxygenase; Deficiency of UDPglucose-hexose-1-phosphate uridylyltransferase; Deficiency of xanthine oxidase; Dejerine-Sottas disease; Charcot-Marie-Tooth disease, types ID and IVF; Dejerine-Sottas syndrome, autosomal dominant; Dendritic cell, monocyte, B lymphocyte, and natural killer lymphocyte deficiency; Desbuquois dysplasia 2; Desbuquois syndrome; DFNA 2 Nonsyndromic Hearing Loss; Diabetes mellitus and insipidus with optic atrophy and deafness; Diabetes mellitus, type 2, and insulin-dependent, 20; Diamond-Blackfan anemia 1, 5, 8, and 10; Diarrhea 3 (secretory sodium, congenital, syndromic) and 5 (with tufting enteropathy, congenital); Dicarboxylic aminoaciduria; Diffuse palmoplantar keratoderma, Bothnian type; Digitorenocerebral syndrome; Dihydropteridine reductase deficiency; Dilated cardiomyopathy 1A, 1AA, 1C, 1G, 1BB, 1DD, 1FF, 1HH, 11, 1KK, 1N, 1S, 1Y, and 3B; Left ventricular noncompaction 3; Disordered steroidogenesis due to cytochrome p450 oxidoreductase deficiency; Distal arthrogryposis type 2B; Distal hereditary motor neuronopathy type 2B; Distal myopathy Markesbery-Griggs type; Distal spinal muscular atrophy, X-linked 3; Distichiasis-lymphedema syndrome; Dominant dystrophic epidermolysis bullosa with absence of skin; Dominant hereditary optic atrophy; Donnai Barrow syndrome; Dopamine beta hydroxylase deficiency; Dopamine receptor d2, reduced brain density of; Dowling-degos disease 4; Doyne honeycomb retinal dystrophy; Malattia leventinese; Duane syndrome type 2; Dubin-Johnson syndrome; Duchenne muscular dystrophy; Becker muscular dystrophy; Dysfibrinogenemia; Dyskeratosis congenita autosomal dominant and autosomal dominant, 3; Dyskeratosis congenita, autosomal recessive, 1, 3, 4, and 5; Dyskeratosis congenita X-linked; Dyskinesia, familial, with facial myokymia; Dysplasminogenemia; Dystonia 2 (torsion, autosomal recessive), 3 (torsion, X-linked), 5 (Dopa-responsive type), 10, 12, 16, 25, 26 (Myoclonic); Seizures, benign familial infantile, 2; Early infantile epileptic encephalopathy 2, 4, 7, 9, 10, 11, 13, and 14; Atypical Rett syndrome; Early T cell progenitor acute lymphoblastic leukemia; Ectodermal dysplasia skin fragility syndrome; Ectodermal dysplasia-syndactyly syndrome 1; Ectopia lentis, isolated autosomal recessive and dominant; Ectrodactyly, ectodermal dysplasia, and cleft lip/palate syndrome 3; Ehlers-Danlos syndrome type 7 (autosomal recessive), classic type, type 2 (progeroid), hydroxylysine-deficient, type 4, type 4 variant, and due to tenascin-X deficiency; Eichsfeld type congenital muscular dystrophy; Endocrine-cerebroosteodysplasia; Enhanced s-cone syndrome; Enlarged vestibular aqueduct syndrome; Enterokinase deficiency; Epidermodysplasia verruciformis; Epidermolysa bullosa simplex and limb girdle muscular dystrophy, simplex with mottled pigmentation, simplex with pyloric atresia, simplex, autosomal recessive, and with pyloric atresia; Epidermolytic palmoplantar keratoderma; Familial febrile seizures 8; Epilepsy, childhood absence 2, 12 (idiopathic generalized, susceptibility to) 5 (nocturnal frontal lobe), nocturnal frontal lobe type 1, partial, with variable foci, progressive myoclonic 3, and X-linked, with variable learning disabilities and behavior disorders; Epileptic encephalopathy, childhood-onset, early infantile, 1, 19, 23, 25, 30, and 32; Epiphyseal dysplasia, multiple, with myopia and conductive deafness; Episodic ataxia type 2; Episodic pain syndrome, familial, 3; Epstein syndrome; Fechtner syndrome; Erythropoietic protoporphyria; Estrogen resistance; Exudative vitreoretinopathy 6; Fabry disease and Fabry disease, cardiac variant; Factor H, VII, X, v and factor viii, combined deficiency of 2, xiii, a subunit, deficiency; Familial adenomatous polyposis 1 and 3; Familial amyloid nephropathy with urticaria and deafness; Familial cold urticarial; Familial aplasia of the vermis; Familial benign pemphigus; Familial cancer of breast; Breast cancer, susceptibility to; Osteosarcoma; Pancreatic cancer 3; Familial cardiomyopathy; Familial cold autoinflammatory syndrome 2; Familial colorectal cancer; Familial exudative vitreoretinopathy, X-linked; Familial hemiplegic migraine types 1 and 2; Familial hypercholesterolemia; Familial hypertrophic cardiomyopathy 1, 2, 3, 4, 7, 10, 23 and 24; Familial hypokalemia-hypomagnesemia; Familial hypoplastic, glomerulocystic kidney; Familial infantile myasthenia; Familial juvenile gout; Familial Mediterranean fever and Familial mediterranean fever, autosomal dominant; Familial porencephaly; Familial porphyria cutanea tarda; Familial pulmonary capillary hemangiomatosis; Familial renal glucosuria; Familial renal hypouricemia; Familial restrictive cardiomyopathy 1; Familial type 1 and 3 hyperlipoproteinemia; Fanconi anemia, complementation group E, I, N, and O; Fanconi-Bickel syndrome; Favism, susceptibility to; Febrile seizures, familial, 11; Feingold syndrome 1; Fetal hemoglobin quantitative trait locus 1; FG syndrome and FG syndrome 4; Fibrosis of extraocular muscles, congenital, 1, 2, 3a (with or without extraocular involvement), 3b; Fish-eye disease; Fleck corneal dystrophy; Floating-Harbor syndrome; Focal epilepsy with speech disorder with or without mental retardation; Focal segmental glomerulosclerosis 5; Forebrain defects; Frank Ter Haar syndrome; Borrone Di Rocco Crovato syndrome; Frasier syndrome; Wilms tumor 1; Freeman-Sheldon syndrome; Frontometaphyseal dysplasia land 3; Frontotemporal dementia; Frontotemporal dementia and/or amyotrophic lateral sclerosis 3 and 4; Frontotemporal Dementia Chromosome 3-Linked and Frontotemporal dementia ubiquitin-positive; Fructose-biphosphatase deficiency; Fuhrmann syndrome; Gamma-aminobutyric acid transaminase deficiency; Gamstorp-Wohlfart syndrome; Gaucher disease type 1 and Subacute neuronopathic; Gaze palsy, familial horizontal, with progressive scoliosis; Generalized dominant dystrophic epidermolysis bullosa; Generalized epilepsy with febrile seizures plus 3, type 1, type 2; Epileptic encephalopathy Lennox-Gastaut type; Giant axonal neuropathy; Glanzmann thrombasthenia; Glaucoma 1, open angle, e, F, and G; Glaucoma 3, primary congenital, d; Glaucoma, congenital and Glaucoma, congenital, Coloboma; Glaucoma, primary open angle, juvenile-onset; Glioma susceptibility 1; Glucose transporter type 1 deficiency syndrome; Glucose-6-phosphate transport defect; GLUT1 deficiency syndrome 2; Epilepsy, idiopathic generalized, susceptibility to, 12; Glutamate formiminotransferase deficiency; Glutaric acidemia IIA and IIB; Glutaric aciduria, type 1; Gluthathione synthetase deficiency; Glycogen storage disease 0 (muscle), II (adult form), IXa2, IXc, type 1A; type II, type IV, IV (combined hepatic and myopathic), type V, and type VI; Goldmann-Favre syndrome; Gordon syndrome; Gorlin syndrome; Holoprosencephaly sequence; Holoprosencephaly 7; Granulomatous disease, chronic, X-linked, variant; Granulosa cell tumor of the ovary; Gray platelet syndrome; Griscelli syndrome type 3; Groenouw corneal dystrophy type I; Growth and mental retardation, mandibulofacial dysostosis, microcephaly, and cleft palate; Growth hormone deficiency with pituitary anomalies; Growth hormone insensitivity with immunodeficiency; GTP cyclohydrolase I deficiency; Hajdu-Cheney syndrome; Hand foot uterus syndrome; Hearing impairment; Hemangioma, capillary infantile; Hematologic neoplasm; Hemochromatosis type 1, 2B, and 3; Microvascular complications of diabetes 7; Transferrin serum level quantitative trait locus 2; Hemoglobin H disease, nondeletional; Hemolytic anemia, nonspherocytic, due to glucose phosphate isomerase deficiency; Hemophagocytic lymphohistiocytosis, familial, 2; Hemophagocytic lymphohistiocytosis, familial, 3; Heparin cofactor II deficiency; Hereditary acrodermatitis enteropathica; Hereditary breast and ovarian cancer syndrome; Ataxia-telangiectasia-like disorder; Hereditary diffuse gastric cancer; Hereditary diffuse leukoencephalopathy with spheroids; Hereditary factors II, IX, VIII deficiency disease; Hereditary hemorrhagic telangiectasia type 2; Hereditary insensitivity to pain with anhidrosis; Hereditary lymphedema type I; Hereditary motor and sensory neuropathy with optic atrophy; Hereditary myopathy with early respiratory failure; Hereditary neuralgic amyotrophy; Hereditary Nonpolyposis Colorectal Neoplasms; Lynch syndrome I and II; Hereditary pancreatitis; Pancreatitis, chronic, susceptibility to; Hereditary sensory and autonomic neuropathy type IIB amd IIA; Hereditary sideroblastic anemia; Hermansky-Pudlak syndrome 1, 3, 4, and 6; Heterotaxy, visceral, 2, 4, and 6, autosomal; Heterotaxy, visceral, X-linked; Heterotopia; Histiocytic medullary reticulosis; Histiocytosis-lymphadenopathy plus syndrome; Holocarboxylase synthetase deficiency; Holoprosencephaly 2, 3, 7, and 9; Holt-Oram syndrome; Homocysteinemia due to MTHFR deficiency, CBS deficiency, and Homocystinuria, pyridoxine-responsive; Homocystinuria-Megaloblastic anemia due to defect in cobalamin metabolism, cblE complementation type; Howel-Evans syndrome; Hurler syndrome; Hutchinson-Gilford syndrome; Hydrocephalus; Hyperammonemia, type III; Hypercholesterolaemia and Hypercholesterolemia, autosomal recessive; Hyperekplexia 2 and Hyperekplexia hereditary; Hyperferritinemia cataract syndrome; Hyperglycinuria; Hyperimmunoglobulin D with periodic fever; Mevalonic aciduria; Hyperimmunoglobulin E syndrome; Hyperinsulinemic hypoglycemia familial 3, 4, and 5; Hyperinsulinism-hyperammonemia syndrome; Hyperlysinemia; Hypermanganesemia with dystonia, polycythemia and cirrhosis; Hyperornithinemia-hyperammonemia-homocitrullinuria syndrome; Hyperparathyroidism 1 and 2; Hyperparathyroidism, neonatal severe; Hyperphenylalaninemia, bh4-deficient, a, due to partial pts deficiency, BH4-deficient, D, and non-pku; Hyperphosphatasia with mental retardation syndrome 2, 3, and 4; Hypertrichotic osteochondrodysplasia; Hypobetalipoproteinemia, familial, associated with apob32; Hypocalcemia, autosomal dominant 1; Hypocalciuric hypercalcemia, familial, types 1 and 3; Hypochondrogenesis; Hypochromic microcytic anemia with iron overload; Hypoglycemia with deficiency of glycogen synthetase in the liver; Hypogonadotropic hypogonadism 11 with or without anosmia; Hypohidrotic ectodermal dysplasia with immune deficiency; Hypohidrotic X-linked ectodermal dysplasia; Hypokalemic periodic paralysis 1 and 2; Hypomagnesemia 1, intestinal; Hypomagnesemia, seizures, and mental retardation; Hypomyelinating leukodystrophy 7; Hypoplastic left heart syndrome; Atrioventricular septal defect and common atrioventricular junction; Hypospadias 1 and 2, X-linked; Hypothyroidism, congenital, nongoitrous, 1; Hypotrichosis 8 and 12; Hypotrichosis-lymphedema-telangiectasia syndrome; I blood group system; Ichthyosis bullosa of Siemens; Ichthyosis exfoliativa; Ichthyosis prematurity syndrome; Idiopathic basal ganglia calcification 5; Idiopathic fibrosing alveolitis, chronic form; Dyskeratosis congenita, autosomal dominant, 2 and 5; Idiopathic hypercalcemia of infancy; Immune dysfunction with T-cell inactivation due to calcium entry defect 2; Immunodeficiency 15, 16, 19, 30, 31C, 38, 40, 8, due to defect in cd3-zeta, with hyper IgM type 1 and 2, and X-Linked, with magnesium defect, Epstein-Barr virus infection, and neoplasia; Immunodeficiency-centromeric instability-facial anomalies syndrome 2; Inclusion body myopathy 2 and 3; Nonaka myopathy; Infantile convulsions and paroxysmal choreoathetosis, familial; Infantile cortical hyperostosis; Infantile GM1 gangliosidosis; Infantile hypophosphatasia; Infantile nephronophthisis; Infantile nystagmus, X-linked; Infantile Parkinsonism-dystonia; Infertility associated with multi-tailed spermatozoa and excessive DNA; Insulin resistance; Insulin-resistant diabetes mellitus and acanthosis nigricans; Insulin-dependent diabetes mellitus secretory diarrhea syndrome; Interstitial nephritis, karyomegalic; Intrauterine growth retardation, metaphyseal dysplasia, adrenal hypoplasia congenita, and genital anomalies; Iodotyrosyl coupling defect; IRAK4 deficiency; Iridogoniodysgenesis dominant type and type 1; Iron accumulation in brain; Ischiopatellar dysplasia; Islet cell hyperplasia; Isolated 17,20-lyase deficiency; Isolated lutropin deficiency; Isovaleryl-CoA dehydrogenase deficiency; Jankovic Rivera syndrome; Jervell and Lange-Nielsen syndrome 2; Joubert syndrome 1, 6, 7, 9/15 (digenic), 14, 16, and 17, and Orofaciodigital syndrome xiv; Junctional epidermolysis bullosa gravis of Herlitz; Juvenile GM>1<gangliosidosis; Juvenile polyposis syndrome; Juvenile polyposis/hereditary hemorrhagic telangiectasia syndrome; Juvenile retinoschisis; Kabuki make-up syndrome; Kallmann syndrome 1, 2, and 6; Delayed puberty; Kanzaki disease; Karak syndrome; Kartagener syndrome; Kenny-Caffey syndrome type 2; Keppen-Lubinsky syndrome; Keratoconus 1; Keratosis follicularis; Keratosis palmoplantaris striata 1; Kindler syndrome; L-2-hydroxyglutaric aciduria; Larsen syndrome, dominant type; Lattice corneal dystrophy Type III; Leber amaurosis; Zellweger syndrome; Peroxisome biogenesis disorders; Zellweger syndrome spectrum; Leber congenital amaurosis 11, 12, 13, 16, 4, 7, and 9; Leber optic atrophy; Aminoglycoside-induced deafness; Deafness, nonsyndromic sensorineural, mitochondrial; Left ventricular noncompaction 5; Left-right axis malformations; Leigh disease; Mitochondrial short-chain Enoyl-CoA Hydratase 1 deficiency; Leigh syndrome due to mitochondrial complex I deficiency; Leiner disease; Leri Weill dyschondrosteosis; Lethal congenital contracture syndrome 6; Leukocyte adhesion deficiency type I and III; Leukodystrophy, Hypomyelinating, 11 and 6; Leukoencephalopathy with ataxia, with Brainstem and Spinal Cord Involvement and Lactate Elevation, with vanishing white matter, and progressive, with ovarian failure; Leukonychia totalis; Lewy body dementia; Lichtenstein-Knorr Syndrome; Li-Fraumeni syndrome 1; Lig4 syndrome; Limb-girdle muscular dystrophy, type 1B, 2A, 2B, 2D, C1, C5, C9, C14; Congenital muscular dystrophy-dystroglycanopathy with brain and eye anomalies, type A14 and B14; Lipase deficiency combined; Lipid proteinosis; Lipodystrophy, familial partial, type 2 and 3; Lissencephaly 1, 2 (X-linked), 3, 6 (with microcephaly), X-linked; Subcortical laminar heterotopia, X-linked; Liver failure acute infantile; Loeys-Dietz syndrome 1, 2, 3; Long QT syndrome 1, 2, 2/9, 2/5, (digenic), 3, 5 and 5, acquired, susceptibility to; Lung cancer; Lymphedema, hereditary, id; Lymphedema, primary, with myelodysplasia; Lymphoproliferative syndrome 1, 1 (X-linked), and 2; Lysosomal acid lipase deficiency; Macrocephaly, macrosomia, facial dysmorphism syndrome; Macular dystrophy, vitelliform, adult-onset; Malignant hyperthermia susceptibility type 1; Malignant lymphoma, non-Hodgkin; Malignant melanoma; Malignant tumor of prostate; Mandibuloacral dysostosis; Mandibuloacral dysplasia with type A or B lipodystrophy, atypical; Mandibulofacial dysostosis, Treacher Collins type, autosomal recessive; Mannose-binding protein deficiency; Maple syrup urine disease type 1A and type 3; Marden Walker like syndrome; Marfan syndrome; Marinesco-Sjxc3xb6gren syndrome; Martsolf syndrome; Maturity-onset diabetes of the young, type 1, type 2, type 11, type 3, and type 9; May-Hegglin anomaly; MYH9 related disorders; Sebastian syndrome; McCune-Albright syndrome; Somatotroph adenoma; Sex cord-stromal tumor; Cushing syndrome; McKusick Kaufman syndrome; McLeod neuroacanthocytosis syndrome; Meckel-Gruber syndrome; Medium-chain acyl-coenzyme A dehydrogenase deficiency; Medulloblastoma; Megalencephalic leukoencephalopathy with subcortical cysts land 2a; Megalencephaly cutis marmorata telangiectatica congenital; PIK3CA Related Overgrowth Spectrum; Megalencephaly-polymicrogyria-polydactyly-hydrocephalus syndrome 2; Megaloblastic anemia, thiamine-responsive, with diabetes mellitus and sensorineural deafness; Meier-Gorlin syndromes land 4; Melnick-Needles syndrome; Meningioma; Mental retardation, X-linked, 3, 21, 30, and 72; Mental retardation and microcephaly with pontine and cerebellar hypoplasia; Mental retardation X-linked syndromic 5; Mental retardation, anterior maxillary protrusion, and strabismus; Mental retardation, autosomal dominant 12, 13, 15, 24, 3, 30, 4, 5, 6, and 9; Mental retardation, autosomal recessive 15, 44, 46, and 5; Mental retardation, stereotypic movements, epilepsy, and/or cerebral malformations; Mental retardation, syndromic, Claes-Jensen type, X-linked; Mental retardation, X-linked, nonspecific, syndromic, Hedera type, and syndromic, wu type; Merosin deficient congenital muscular dystrophy; Metachromatic leukodystrophy juvenile, late infantile, and adult types; Metachromatic leukodystrophy; Metatrophic dysplasia; Methemoglobinemia types I and 2; Methionine adenosyltransferase deficiency, autosomal dominant; Methylmalonic acidemia with homocystinuria; Methylmalonic aciduria cblB type; Methylmalonic aciduria due to methylmalonyl-CoA mutase deficiency; METHYLMALONIC ACIDURIA, mut(0) TYPE; Microcephalic osteodysplastic primordial dwarfism type 2; Microcephaly with or without chorioretinopathy, lymphedema, or mental retardation; Microcephaly, hiatal hernia and nephrotic syndrome; Microcephaly; Hypoplasia of the corpus callosum; Spastic paraplegia 50, autosomal recessive; Global developmental delay; CNS hypomyelination; Brain atrophy; Microcephaly, normal intelligence and immunodeficiency; Microcephaly-capillary malformation syndrome; Microcytic anemia; Microphthalmia syndromic 5, 7, and 9; Microphthalmia, isolated 3, 5, 6, 8, and with coloboma 6; Microspherophakia; Migraine, familial basilar; Miller syndrome; Minicore myopathy with external ophthalmoplegia; Myopathy, congenital with cores; Mitchell-Riley syndrome; mitochondrial 3-hydroxy-3-methylglutaryl-CoA synthase deficiency; Mitochondrial complex I, II, III, III (nuclear type 2, 4, or 8) deficiency; Mitochondrial DNA depletion syndrome 11, 12 (cardiomyopathic type), 2, 4B (MNGIE type), 8B (MNGIE type); Mitochondrial DNA-depletion syndrome 3 and 7, hepatocerebral types, and 13 (encephalomyopathic type); Mitochondrial phosphate carrier and pyruvate carrier deficiency; Mitochondrial trifunctional protein deficiency; Long-chain 3-hydroxyacyl-CoA dehydrogenase deficiency; Miyoshi muscular dystrophy 1; Myopathy, distal, with anterior tibial onset; Mohr-Tranebjaerg syndrome; Molybdenum cofactor deficiency, complementation group A; Mowat-Wilson syndrome; Mucolipidosis III Gamma; Mucopolysaccharidosis type VI, type VI (severe), and type VII; Mucopolysaccharidosis, MPS-I-H/S, MPS-II, MPS-III-A, MPS-III-B, MPS-III-C, MPS-IV-A, MPS-IV-B; Retinitis Pigmentosa 73; Gangliosidosis GM1 typel (with cardiac involvement) 3; Multicentric osteolysis nephropathy; Multicentric osteolysis, nodulosis and arthropathy; Multiple congenital anomalies; Atrial septal defect 2; Multiple congenital anomalies-hypotonia-seizures syndrome 3; Multiple Cutaneous and Mucosal Venous Malformations; Multiple endocrine neoplasia, types land 4; Multiple epiphyseal dysplasia 5 or Dominant; Multiple gastrointestinal atresias; Multiple pterygium syndrome Escobar type; Multiple sulfatase deficiency; Multiple synostoses syndrome 3; Muscle AMP guanine oxidase deficiency; Muscle eye brain disease; Muscular dystrophy, congenital, megaconial type; Myasthenia, familial infantile, 1; Myasthenic Syndrome, Congenital, 11, associated with acetylcholine receptor deficiency; Myasthenic Syndrome, Congenital, 17, 2A (slow-channel), 4B (fast-channel), and without tubular aggregates; Myeloperoxidase deficiency; MYH-associated polyposis; Endometrial carcinoma; Myocardial infarction 1; Myoclonic dystonia; Myoclonic-Atonic Epilepsy; Myoclonus with epilepsy with ragged red fibers; Myofibrillar myopathy 1 and ZASP-related; Myoglobinuria, acute recurrent, autosomal recessive; Myoneural gastrointestinal encephalopathy syndrome; Cerebellar ataxia infantile with progressive external ophthalmoplegia; Mitochondrial DNA depletion syndrome 4B, MNGIE type; Myopathy, centronuclear, 1, congenital, with excess of muscle spindles, distal, 1, lactic acidosis, and sideroblastic anemia 1, mitochondrial progressive with congenital cataract, hearing loss, and developmental delay, and tubular aggregate, 2; Myopia 6; Myosclerosis, autosomal recessive; Myotonia congenital; Congenital myotonia, autosomal dominant and recessive forms; Nail-patella syndrome; Nance-Horan syndrome; Nanophthalmos 2; Navajo neurohepatopathy; Nemaline myopathy 3 and 9; Neonatal hypotonia; Intellectual disability; Seizures; Delayed speech and language development; Mental retardation, autosomal dominant 31; Neonatal intrahepatic cholestasis caused by citrin deficiency; Nephrogenic diabetes insipidus, Nephrogenic diabetes insipidus, X-linked; Nephrolithiasis/osteoporosis, hypophosphatemic, 2; Nephronophthisis 13, 15 and 4; Infertility; Cerebello-oculo-renal syndrome (nephronophthisis, oculomotor apraxia and cerebellar abnormalities); Nephrotic syndrome, type 3, type 5, with or without ocular abnormalities, type 7, and type 9; Nestor-Guillermo progeria syndrome; Neu-Laxova syndrome 1; Neurodegeneration with brain iron accumulation 4 and 6; Neuroferritinopathy; Neurofibromatosis, type land type 2; Neurofibrosarcoma; Neurohypophyseal diabetes insipidus; Neuropathy, Hereditary Sensory, Type IC; Neutral 1 amino acid transport defect; Neutral lipid storage disease with myopathy; Neutrophil immunodeficiency syndrome; Nicolaides-Baraitser syndrome; Niemann-Pick disease type C1, C2, type A, and type C1, adult form; Non-ketotic hyperglycinemia; Noonan syndrome 1 and 4, LEOPARD syndrome 1; Noonan syndrome-like disorder with or without juvenile myelomonocytic leukemia; Normokalemic periodic paralysis, potassium-sensitive; Norum disease; Epilepsy, Hearing Loss, And Mental Retardation Syndrome; Mental Retardation, X-Linked 102 and syndromic 13; Obesity; Ocular albinism, type I; Oculocutaneous albinism type 1B, type 3, and type 4; Oculodentodigital dysplasia; Odontohypophosphatasia; Odontotrichomelic syndrome; Oguchi disease; Oligodontia-colorectal cancer syndrome; Opitz G/BBB syndrome; Optic atrophy 9; Oral-facial-digital syndrome; Ornithine aminotransferase deficiency; Orofacial cleft 11 and 7, Cleft lip/palate-ectodermal dysplasia syndrome; Orstavik Lindemann Solberg syndrome; Osteoarthritis with mild chondrodysplasia; Osteochondritis dissecans; Osteogenesis imperfecta type 12, type 5, type 7, type 8, type I, type III, with normal sclerae, dominant form, recessive perinatal lethal; Osteopathia striata with cranial sclerosis; Osteopetrosis autosomal dominant type 1 and 2, recessive 4, recessive 1, recessive 6; Osteoporosis with pseudoglioma; Oto-palato-digital syndrome, types I and II; Ovarian dysgenesis 1; Ovarioleukodystrophy; Pachyonychia congenita 4 and type 2; Paget disease of bone, familial; Pallister-Hall syndrome; Palmoplantar keratoderma, nonepidermolytic, focal or diffuse; Pancreatic agenesis and congenital heart disease; Papillon-LefAxc3xa8vre syndrome; Paragangliomas 3; Paramyotonia congenita of von Eulenburg; Parathyroid carcinoma; Parkinson disease 14, 15, 19 (juvenile-onset), 2, 20 (early-onset), 6, (autosomal recessive early-onset, and 9; Partial albinism; Partial hypoxanthine-guanine phosphoribosyltransferase deficiency; Patterned dystrophy of retinal pigment epithelium; PC-K6a; Pelizaeus-Merzbacher disease; Pendred syndrome; Peripheral demyelinating neuropathy, central dysmyelination; Hirschsprung disease; Permanent neonatal diabetes mellitus; Diabetes mellitus, permanent neonatal, with neurologic features; Neonatal insulin-dependent diabetes mellitus; Maturity-onset diabetes of the young, type 2; Peroxisome biogenesis disorder 14B, 2A, 4A, 5B, 6A, 7A, and 7B; Perrault syndrome 4; Perry syndrome; Persistent hyperinsulinemic hypoglycemia of infancy; familial hyperinsulinism; Phenotypes; Phenylketonuria; Pheochromocytoma; Hereditary Paraganglioma-Pheochromocytoma Syndromes; Paragangliomas 1; Carcinoid tumor of intestine; Cowden syndrome 3; Phosphoglycerate dehydrogenase deficiency; Phosphoglycerate kinase 1 deficiency; Photosensitive trichothiodystrophy; Phytanic acid storage disease; Pick disease; Pierson syndrome; Pigmentary retinal dystrophy; Pigmented nodular adrenocortical disease, primary, 1; Pilomatrixoma; Pitt-Hopkins syndrome; Pituitary dependent hypercortisolism; Pituitary hormone deficiency, combined 1, 2, 3, and 4; Plasminogen activator inhibitor type 1 deficiency; Plasminogen deficiency, type I; Platelet-type bleeding disorder 15 and 8; Poikiloderma, hereditary fibrosing, with tendon contractures, myopathy, and pulmonary fibrosis; Polycystic kidney disease 2, adult type, and infantile type; Polycystic lipomembranous osteodysplasia with sclerosing leukoencephalopathy; Polyglucosan body myopathy 1 with or without immunodeficiency; Polymicrogyria, asymmetric, bilateral frontoparietal; Polyneuropathy, hearing loss, ataxia, retinitis pigmentosa, and cataract; Pontocerebellar hypoplasia type 4; Popliteal pterygium syndrome; Porencephaly 2; Porokeratosis 8, disseminated superficial actinic type; Porphobilinogen synthase deficiency; Porphyria cutanea tarda; Posterior column ataxia with retinitis pigmentosa; Posterior polar cataract type 2; Prader-Willi-like syndrome; Premature ovarian failure 4, 5, 7, and 9; Primary autosomal recessive microcephaly 10, 2, 3, and 5; Primary ciliary dyskinesia 24; Primary dilated cardiomyopathy; Left ventricular noncompaction 6; 4, Left ventricular noncompaction 10; Paroxysmal atrial fibrillation; Primary hyperoxaluria, type I, type, and type III; Primary hypertrophic osteoarthropathy, autosomal recessive 2; Primary hypomagnesemia; Primary open angle glaucoma juvenile onset 1; Primary pulmonary hypertension; Primrose syndrome; Progressive familial heart block type 1B; Progressive familial intrahepatic cholestasis 2 and 3; Progressive intrahepatic cholestasis; Progressive myoclonus epilepsy with ataxia; Progressive pseudorheumatoid dysplasia; Progressive sclerosing poliodystrophy; Prolidase deficiency; Proline dehydrogenase deficiency; Schizophrenia 4; Properdin deficiency, X-linked; Propionic academia; Proprotein convertase 1/3 deficiency; Prostate cancer, hereditary, 2; Protan defect; Proteinuria; Finnish congenital nephrotic syndrome; Proteus syndrome; Breast adenocarcinoma; Pseudoachondroplastic spondyloepiphyseal dysplasia syndrome; Pseudohypoaldosteronism type 1 autosomal dominant and recessive and type 2; Pseudohypoparathyroidism type 1A, Pseudopseudohypoparathyroidism; Pseudoneonatal adrenoleukodystrophy; Pseudoprimary hyperaldosteronism; Pseudoxanthoma elasticum; Generalized arterial calcification of infancy 2; Pseudoxanthoma elasticum-like disorder with multiple coagulation factor deficiency; Psoriasis susceptibility 2; PTEN hamartoma tumor syndrome; Pulmonary arterial hypertension related to hereditary hemorrhagic telangiectasia; Pulmonary Fibrosis And/Or Bone Marrow Failure, Telomere-Related, 1 and 3; Pulmonary hypertension, primary, 1, with hereditary hemorrhagic telangiectasia; Purine-nucleoside phosphorylase deficiency; Pyruvate carboxylase deficiency; Pyruvate dehydrogenase E1-alpha deficiency; Pyruvate kinase deficiency of red cells; Raine syndrome; Rasopathy; Recessive dystrophic epidermolysis bullosa; Nail disorder, nonsyndromic congenital, 8; Reifenstein syndrome; Renal adysplasia; Renal carnitine transport defect; Renal coloboma syndrome; Renal dysplasia; Renal dysplasia, retinal pigmentary dystrophy, cerebellar ataxia and skeletal dysplasia; Renal tubular acidosis, distal, autosomal recessive, with late-onset sensorineural hearing loss, or with hemolytic anemia; Renal tubular acidosis, proximal, with ocular abnormalities and mental retardation; Retinal cone dystrophy 3B; Retinitis pigmentosa; Retinitis pigmentosa 10, 11, 12, 14, 15, 17, and 19; Retinitis pigmentosa 2, 20, 25, 35, 36, 38, 39, 4, 40, 43, 45, 48, 66, 7, 70, 72; Retinoblastoma; Rett disorder; Rhabdoid tumor predisposition syndrome 2; Rhegmatogenous retinal detachment, autosomal dominant; Rhizomelic chondrodysplasia punctata type 2 and type 3; Roberts-SC phocomelia syndrome; Robinow Sorauf syndrome; Robinow syndrome, autosomal recessive, autosomal recessive, with brachy-syn-polydactyly; Rothmund-Thomson syndrome; Rapadilino syndrome; RRM2B-related mitochondrial disease; Rubinstein-Taybi syndrome; Salla disease; Sandhoff disease, adult and infantil types; Sarcoidosis, early-onset; Blau syndrome; Schindler disease, type 1; Schizencephaly; Schizophrenia 15; Schneckenbecken dysplasia; Schwannomatosis 2; Schwartz Jampel syndrome type 1; Sclerocornea, autosomal recessive; Sclerosteosis; Secondary hypothyroidism; Segawa syndrome, autosomal recessive; Senior-Loken syndrome 4 and 5; Sensory ataxic neuropathy, dysarthria, and ophthalmoparesis; Sepiapterin reductase deficiency; SeSAME syndrome; Severe combined immunodeficiency due to ADA deficiency, with microcephaly, growth retardation, and sensitivity to ionizing radiation, atypical, autosomal recessive, T cell-negative, B cell-positive, NK cell-negative of NK-positive; Severe congenital neutropenia; Severe congenital neutropenia 3, autosomal recessive or dominant; Severe congenital neutropenia and 6, autosomal recessive; Severe myoclonic epilepsy in infancy; Generalized epilepsy with febrile seizures plus, types 1 and 2; Severe X-linked myotubular myopathy; Short QT syndrome 3; Short stature with nonspecific skeletal abnormalities; Short stature, auditory canal atresia, mandibular hypoplasia, skeletal abnormalities; Short stature, onychodysplasia, facial dysmorphism, and hypotrichosis; Primordial dwarfism; Short-rib thoracic dysplasia 11 or 3 with or without polydactyly; Sialidosis type I and II; Silver spastic paraplegia syndrome; Slowed nerve conduction velocity, autosomal dominant; Smith-Lemli-Opitz syndrome; Snyder Robinson syndrome; Somatotroph adenoma; Prolactinoma; familial, Pituitary adenoma predisposition; Sotos syndrome 1 or 2; Spastic ataxia 5, autosomal recessive, Charlevoix-Saguenay type, 1,10, or 11, autosomal recessive; Amyotrophic lateral sclerosis type 5; Spastic paraplegia 15, 2, 3, 35, 39, 4, autosomal dominant, 55, autosomal recessive, and 5A; Bile acid synthesis defect, congenital, 3; Spermatogenic failure 11, 3, and 8; Spherocytosis types 4 and 5; Spheroid body myopathy; Spinal muscular atrophy, lower extremity predominant 2, autosomal dominant; Spinal muscular atrophy, type II; Spinocerebellar ataxia 14, 21, 35, 40, and 6; Spinocerebellar ataxia autosomal recessive 1 and 16; Splenic hypoplasia; Spondylocarpotarsal synostosis syndrome; Spondylocheirodysplasia, Ehlers-Danlos syndrome-like, with immune dysregulation, Aggrecan type, with congenital joint dislocations, short limb-hand type, Sedaghatian type, with cone-rod dystrophy, and Kozlowski type; Parastremmatic dwarfism; Stargardt disease 1; Cone-rod dystrophy 3; Stickler syndrome type 1; Kniest dysplasia; Stickler syndrome, types 1 (nonsyndromic ocular) and 4; Sting-associated vasculopathy, infantile-onset; Stormorken syndrome; Sturge-Weber syndrome, Capillary malformations, congenital, 1; Succinyl-CoA acetoacetate transferase deficiency; Sucrase-isomaltase deficiency; Sudden infant death syndrome; Sulfite oxidase deficiency, isolated; Supravalvar aortic stenosis; Surfactant metabolism dysfunction, pulmonary, 2 and 3; Symphalangism, proximal, 1b; Syndactyly Cenani Lenz type; Syndactyly type 3; Syndromic X-linked mental retardation 16; Talipes equinovarus; Tangier disease; TARP syndrome; Tay-Sachs disease, B1 variant, Gm2-gangliosidosis (adult), Gm2-gangliosidosis (adult-onset); Temtamy syndrome; Tenorio Syndrome; Terminal osseous dysplasia; Testosterone 17-beta-dehydrogenase deficiency; Tetraamelia, autosomal recessive; Tetralogy of Fallot; Hypoplastic left heart syndrome 2; Truncus arteriosus; Malformation of the heart and great vessels; Ventricular septal defect 1; Thiel-Behnke corneal dystrophy; Thoracic aortic aneurysms and aortic dissections; Marfanoid habitus; Three M syndrome 2; Thrombocytopenia, platelet dysfunction, hemolysis, and imbalanced globin synthesis; Thrombocytopenia, X-linked; Thrombophilia, hereditary, due to protein C deficiency, autosomal dominant and recessive; Thyroid agenesis; Thyroid cancer, follicular; Thyroid hormone metabolism, abnormal; Thyroid hormone resistance, generalized, autosomal dominant; Thyrotoxic periodic paralysis and Thyrotoxic periodic paralysis 2; Thyrotropin-releasing hormone resistance, generalized; Timothy syndrome; TNF receptor-associated periodic fever syndrome (TRAPS); Tooth agenesis, selective, 3 and 4; Torsades de pointes; Townes-Brocks-branchiootorenal-like syndrome; Transient bullous dermolysis of the newborn; Treacher collins syndrome 1; Trichomegaly with mental retardation, dwarfism and pigmentary degeneration of retina; Trichorhinophalangeal dysplasia type I; Trichorhinophalangeal syndrome type 3; Trimethylaminuria; Tuberous sclerosis syndrome; Lymphangiomyomatosis; Tuberous sclerosis 1 and 2; Tyrosinase-negative oculocutaneous albinism; Tyrosinase-positive oculocutaneous albinism; Tyrosinemia type I; UDPglucose-4-epimerase deficiency; Ullrich congenital muscular dystrophy; Ulna and fibula absence of with severe limb deficiency; Upshaw-Schulman syndrome; Urocanate hydratase deficiency; Usher syndrome, types 1, 1B, 1D, 1G, 2A, 2C, and 2D; Retinitis pigmentosa 39; UV-sensitive syndrome; Van der Woude syndrome; Van Maldergem syndrome 2; Hennekam lymphangiectasia-lymphedema syndrome 2; Variegate porphyria; Ventriculomegaly with cystic kidney disease; Verheij syndrome; Very long chain acyl-CoA dehydrogenase deficiency; Vesicoureteral reflux 8; Visceral heterotaxy 5, autosomal; Visceral myopathy; Vitamin D-dependent rickets, types land 2; Vitelliform dystrophy; von Willebrand disease type 2M and type 3; Waardenburg syndrome type 1, 4C, and 2E (with neurologic involvement); Klein-Waardenberg syndrome; Walker-Warburg congenital muscular dystrophy; Warburg micro syndrome 2 and 4; Warts, hypogammaglobulinemia, infections, and myelokathexis; Weaver syndrome; Weill-Marchesani syndrome 1 and 3; Weill-Marchesani-like syndrome; Weissenbacher-Zweymuller syndrome; Werdnig-Hoffmann disease; Charcot-Marie-Tooth disease; Werner syndrome; WFS1-Related Disorders; Wiedemann-Steiner syndrome; Wilson disease; Wolfram-like syndrome, autosomal dominant; Worth disease; Van Buchem disease type 2; Xeroderma pigmentosum, complementation group b, group D, group E, and group G; X-linked agammaglobulinemia; X-linked hereditary motor and sensory neuropathy; X-linked ichthyosis with steryl-sulfatase deficiency; X-linked periventricular heterotopia; Oto-palato-digital syndrome, type I; X-linked severe combined immunodeficiency; Zimmermann-Laband syndrome and Zimmermann-Laband syndrome 2; and Zonular pulverulent cataract 3.

### [6] Pharmaceutical Compositions

[0347] Other aspects of the present disclosure relate to pharmaceutical compositions comprising any of the various components of the ribozyme-directed programmable editing system described herein (e.g., including, but not limited to, the napDNAbps, engineered ribozymes, fusion proteins (e.g., comprising napDNAbps and/or target domain and/or engineere ribozymes), guide RNAs, and complexes comprising fusion proteins and guide RNAs, as well as accessory elements.

[0348] The term “pharmaceutical composition”, as used herein, refers to a composition formulated for pharmaceutical use. In some embodiments, the pharmaceutical composition further comprises a pharmaceutically acceptable carrier. In some embodiments, the pharmaceutical composition comprises additional agents (e.g. for specific delivery, increasing half-life, or other therapeutic compounds).

[0349] As used here, the term “pharmaceutically-acceptable carrier” means a pharmaceutically-acceptable material, composition or vehicle, such as a liquid or solid filler, diluent, excipient, manufacturing aid (e.g., lubricant, talc magnesium, calcium or zinc stearate, or steric acid), or solvent encapsulating material, involved in carrying or transporting the compound from one site (e.g., the delivery site) of the body, to another site (e.g., organ, tissue or portion of the body). A pharmaceutically acceptable carrier is “acceptable” in the sense of being compatible with the other ingredients of the formulation and not injurious to the tissue of the subject (e.g., physiologically compatible, sterile, physiologic pH, etc.). Some examples of materials which can serve as pharmaceutically-acceptable carriers include: (1) sugars, such as lactose, glucose and sucrose; (2) starches, such as corn starch and potato starch; (3) cellulose, and its derivatives, such as sodium carboxymethyl cellulose, methylcellulose, ethyl cellulose, microcrystalline cellulose and cellulose acetate; (4) powdered tragacanth; (5) malt; (6) gelatin; (7) lubricating agents, such as magnesium stearate, sodium lauryl sulfate and talc; (8) excipients, such as cocoa butter and suppository waxes; (9) oils, such as peanut oil, cottonseed oil, safflower oil, sesame oil, olive oil, corn oil and soybean oil; (10) glycols, such as propylene glycol; (11) polyols, such as glycerin, sorbitol, mannitol and polyethylene glycol (PEG); (12) esters, such as ethyl oleate and ethyl laurate; (13) agar; (14) buffering agents, such as magnesium hydroxide and aluminum hydroxide; (15) alginic acid; (16) pyrogen-free water; (17) isotonic saline; (18) Ringer's solution; (19) ethyl alcohol; (20) pH buffered solutions; (21) polyesters, polycarbonates and/or polyanhydrides; (22) bulking agents, such as polypeptides and amino acids (23) serum component, such as serum albumin, HDL and LDL; (22) C2-C12 alcohols, such as ethanol; and (23) other non-toxic compatible substances employed in pharmaceutical formulations. Wetting agents, coloring agents, release agents, coating agents, sweetening agents, flavoring agents, perfuming agents, preservative and antioxidants can also be present in the formulation. The terms such as “excipient”, “carrier”, “pharmaceutically acceptable carrier” or the like are used interchangeably herein.

[0350] In some embodiments, the pharmaceutical composition is formulated for delivery to a subject, e.g., for gene editing. Suitable routes of administrating the pharmaceutical composition described herein include, without limitation: topical, subcutaneous, transdermal, intradermal, intralesional, intraarticular, intraperitoneal, intravesical, transmucosal, gingival, intradental, intracochlear, transtympanic, intraorgan, epidural, intrathecal, intramuscular, intravenous, intravascular, intraosseus, periocular, intratumoral, intracerebral, and intracerebroventricular administration.

[0351] In some embodiments, the pharmaceutical composition described herein is administered locally to a diseased site (e.g., tumor site). In some embodiments, the pharmaceutical composition described herein is administered to a subject by injection, by means of a catheter, by means of a suppository, or by means of an implant, the implant being of a porous, non-porous, or gelatinous material, including a membrane, such as a sialastic membrane, or a fiber.

[0352] In other embodiments, the pharmaceutical composition described herein is delivered in a controlled release system. In one embodiment, a pump may be used (see, e.g., Langer, 1990, Science 249:1527-1533; Sefton, 1989, CRC Crit. Ref. Biomed. Eng. 14:201; Buchwald et al., 1980, Surgery 88:507; Saudek et al., 1989, N. Engl. J. Med. 321:574). In another embodiment, polymeric materials can be used. (See, e.g., Medical Applications of Controlled Release (Langer and Wise eds., CRC Press, Boca Raton, Fla., 1974); Controlled Drug Bioavailability, Drug Product Design and Performance (Smolen and Ball eds., Wiley, New York, 1984); Ranger and Peppas, 1983, Macromol. Sci. Rev. Macromol. Chem. 23:61. See also Levy et al., 1985, Science 228:190; During et al., 1989, Ann. Neurol. 25:351; Howard et al., 1989, J. Neurosurg. 71:105.) Other controlled release systems are discussed, for example, in Langer, supra.

[0353] In some embodiments, the pharmaceutical composition is formulated in accordance with routine procedures as a composition adapted for intravenous or subcutaneous administration to a subject, e.g., a human. In some embodiments, pharmaceutical composition for administration by injection are solutions in sterile isotonic aqueous buffer. Where necessary, the pharmaceutical can also include a solubilizing agent and a local anesthetic such as lignocaine to ease pain at the site of the injection. Generally, the ingredients are supplied either separately or mixed together in unit dosage form, for example, as a dry lyophilized powder or water free concentrate in a hermetically sealed container such as an ampoule or sachette indicating the quantity of active agent. Where the pharmaceutical is to be administered by infusion, it can be dispensed with an infusion bottle containing sterile pharmaceutical grade water or saline. Where the pharmaceutical composition is administered by injection, an ampoule of sterile water for injection or saline can be provided so that the ingredients can be mixed prior to administration.

[0354] A pharmaceutical composition for systemic administration may be a liquid, e.g., sterile saline, lactated Ringer's or Hank's solution. In addition, the pharmaceutical composition can be in solid forms and re-dissolved or suspended immediately prior to use. Lyophilized forms are also contemplated.

[0355] The pharmaceutical composition can be contained within a lipid particle or vesicle, such as a liposome or microcrystal, which is also suitable for parenteral administration. The particles can be of any suitable structure, such as unilamellar or plurilamellar, so long as compositions are contained therein. Compounds can be entrapped in “stabilized plasmid-lipid particles” (SPLP) containing the fusogenic lipid dioleoylphosphatidylethanolamine (DOPE), low levels (5-10 mol %) of cationic lipid, and stabilized by a polyethyleneglycol (PEG) coating (Zhang Y. P. et al., Gene Ther. 1999, 6:1438-47). Positively charged lipids such as N-[1-(2,3-dioleoyloxi)propyl]-N,N,N-trimethyl-amoniummethylsulfate, or “DOTAP,” are particularly preferred for such particles and vesicles. The preparation of such lipid particles is well known. See, e.g., U.S. Pat. Nos. 4,880,635; 4,906,477; 4,911,928; 4,917,951; 4,920,016; and 4,921,757; each of which is incorporated herein by reference.

[0356] The pharmaceutical composition described herein may be administered or packaged as a unit dose, for example. The term “unit dose” when used in reference to a pharmaceutical composition of the present disclosure refers to physically discrete units suitable as unitary dosage for the subject, each unit containing a predetermined quantity of active material calculated to produce the desired therapeutic effect in association with the required diluent; i.e., carrier, or vehicle.

[0357] Further, the pharmaceutical composition can be provided as a pharmaceutical kit comprising (a) a container containing a compound of the invention in lyophilized form and (b) a second container containing a pharmaceutically acceptable diluent (e.g., sterile water) for injection. The pharmaceutically acceptable diluent can be used for reconstitution or dilution of the lyophilized compound of the invention. Optionally associated with such container(s) can be a notice in the form prescribed by a governmental agency regulating the manufacture, use or sale of pharmaceuticals or biological products, which notice reflects approval by the agency of manufacture, use or sale for human administration.

[0358] In another aspect, an article of manufacture containing materials useful for the treatment of the diseases described above is included. In some embodiments, the article of manufacture comprises a container and a label. Suitable containers include, for example, bottles, vials, syringes, and test tubes. The containers may be formed from a variety of materials such as glass or plastic. In some embodiments, the container holds a composition that is effective for treating a disease described herein and may have a sterile access port. For example, the container may be an intravenous solution bag or a vial having a stopper pierceable by a hypodermic injection needle. The active agent in the composition is a compound of the invention. In some embodiments, the label on or associated with the container indicates that the composition is used for treating the disease of choice. The article of manufacture may further comprise a second container comprising a pharmaceutically-acceptable buffer, such as phosphate-buffered saline, Ringer's solution, or dextrose solution.

[0359] It may further include other materials desirable from a commercial and user standpoint, including other buffers, diluents, filters, needles, syringes, and package inserts with instructions for use.

### [7] Delivery Methods

[0360] In some aspects, the invention provides methods comprising delivering one or more polynucleotides, such as or one or more vectors as described herein encoding one or more components of the ribozyme-directed programmable editing system described herein, one or more transcripts thereof, and/or one or proteins transcribed therefrom, to a host cell. In some aspects, the invention further provides cells produced by such methods, and organisms (such as animals, plants, or fungi) comprising or produced from such cells. In some embodiments, a base editor as described herein in combination with (and optionally complexed with) a guide sequence is delivered to a cell. Conventional viral and non-viral based gene transfer methods can be used to introduce nucleic acids in mammalian cells or target tissues. Such methods can be used to administer nucleic acids encoding components of a base editor to cells in culture, or in a host organism. Non-viral vector delivery systems include DNA plasmids, RNA (e.g. a transcript of a vector described herein), naked nucleic acid, and nucleic acid complexed with a delivery vehicle, such as a liposome. Viral vector delivery systems include DNA and RNA viruses, which have either episomal or integrated genomes after delivery to the cell. For a review of gene therapy procedures, see Anderson, Science 256:808-813 (1992); Nabel & Felgner, TIBTECH 11:211-217 (1993); Mitani & Caskey, TIBTECH 11:162-166 (1993); Dillon, TIBTECH 11:167-175 (1993); Miller, Nature 357:455-460 (1992); Van Brunt, Biotechnology 6(10):1149-1154 (1988); Vigne, Restorative Neurology and Neuroscience 8:35-36 (1995); Kremer & Perricaudet, British Medical Bulletin 51(1):31-44 (1995); Haddada et al., in Current Topics in Microbiology and Immunology Doerfler and Bihm (eds) (1995); and Yu et al., Gene Therapy 1:13-26 (1994).

[0361] Methods of non-viral delivery of nucleic acids include lipofection, nucleofection, microinjection, biolistics, virosomes, liposomes, immunoliposomes, polycation or lipid:nucleic acid conjugates, naked DNA, artificial virions, and agent-enhanced uptake of DNA. Lipofection is described in e.g., U.S. Pat. Nos. 5,049,386, 4,946,787; and 4,897,355) and lipofection reagents are sold commercially (e.g., Transfectam™ and Lipofectin™) Cationic and neutral lipids that are suitable for efficient receptor-recognition lipofection of polynucleotides include those of Feigner, WO 91/17424; WO 91/16024. Delivery can be to cells (e.g. in vitro or ex vivo administration) or target tissues (e.g. in vivo administration).

[0362] The preparation of lipid:nucleic acid complexes, including targeted liposomes such as immunolipid complexes, is well known to one of skill in the art (see, e.g., Crystal, Science 270:404-410 (1995); Blaese et al., Cancer Gene Ther. 2:291-297 (1995); Behr et al., Bioconjugate Chem. 5:382-389 (1994); Remy et al., Bioconjugate Chem. 5:647-654 (1994); Gao et al., Gene Therapy 2:710-722 (1995); Ahmad et al., Cancer Res. 52:4817-4820 (1992); U.S. Pat. Nos. 4,186,183, 4,217,344, 4,235,871, 4,261,975, 4,485,054, 4,501,728, 4,774,085, 4,837,028, and 4,946,787).

[0363] The use of RNA or DNA viral based systems for the delivery of nucleic acids take advantage of highly evolved processes for targeting a virus to specific cells in the body and trafficking the viral payload to the nucleus. Viral vectors can be administered directly to patients (in vivo) or they can be used to treat cells in vitro, and the modified cells may optionally be administered to patients (ex vivo). Conventional viral based systems could include retroviral, lentivirus, adenoviral, adeno-associated and herpes simplex virus vectors for gene transfer. Integration in the host genome is possible with the retrovirus, lentivirus, and adeno-associated virus gene transfer methods, often resulting in long term expression of the inserted transgene. Additionally, high transduction efficiencies have been observed in many different cell types and target tissues.

[0364] The tropism of a viruses can be altered by incorporating foreign envelope proteins, expanding the potential target population of target cells. Lentiviral vectors are retroviral vectors that are able to transduce or infect non-dividing cells and typically produce high viral titers. Selection of a retroviral gene transfer system would therefore depend on the target tissue. Retroviral vectors are comprised of cis-acting long terminal repeats with packaging capacity for up to 6-10 kb of foreign sequence. The minimum cis-acting LTRs are sufficient for replication and packaging of the vectors, which are then used to integrate the therapeutic gene into the target cell to provide permanent transgene expression. Widely used retroviral vectors include those based upon murine leukemia virus (MuLV), gibbon ape leukemia virus (GaLV), Simian Immuno deficiency virus (SIV), human immuno deficiency virus (HIV), and combinations thereof (see, e.g., Buchscher et al., J. Virol. 66:2731-2739 (1992); Johann et al., J. Virol. 66:1635-1640 (1992); Sommnerfelt et al., Virol. 176:58-59 (1990); Wilson et al., J. Virol. 63:2374-2378 (1989); Miller et al., J. Virol. 65:2220-2224 (1991); PCT/US94/05700). In applications where transient expression is preferred, adenoviral based systems may be used. Adenoviral based vectors are capable of very high transduction efficiency in many cell types and do not require cell division. With such vectors, high titer and levels of expression have been obtained. This vector can be produced in large quantities in a relatively simple system. Adeno-associated virus (“AAV”) vectors may also be used to transduce cells with target nucleic acids, e.g., in the in vitro production of nucleic acids and peptides, and for in vivo and ex vivo gene therapy procedures (see, e.g., West et al., Virology 160:38-47 (1987); U.S. Pat. No. 4,797,368; WO 93/24641; Kotin, Human Gene Therapy 5:793-801 (1994); Muzyczka, J. Clin. Invest. 94:1351 (1994). Construction of recombinant AAV vectors are described in a number of publications, including U.S. Pat. No. 5,173,414; Tratschin et al., Mol. Cell. Biol. 5:3251-3260 (1985); Tratschin, et al., Mol. Cell. Biol. 4:2072-2081 (1984); Hermonat & Muzyczka, PNAS 81:6466-6470 (1984); and Samulski et al., J. Virol. 63:03822-3828 (1989).

[0365] Packaging cells are typically used to form virus particles that are capable of infecting a host cell. Such cells include 293 cells, which package adenovirus, and ψ2 cells or PA317 cells, which package retrovirus. Viral vectors used in gene therapy are usually generated by producing a cell line that packages a nucleic acid vector into a viral particle. The vectors typically contain the minimal viral sequences required for packaging and subsequent integration into a host, other viral sequences being replaced by an expression cassette for the polynucleotide(s) to be expressed. The missing viral functions are typically supplied in trans by the packaging cell line. For example, AAV vectors used in gene therapy typically only possess ITR sequences from the AAV genome which are required for packaging and integration into the host genome. Viral DNA is packaged in a cell line, which contains a helper plasmid encoding the other AAV genes, namely rep and cap, but lacking ITR sequences. The cell line may also be infected with adenovirus as a helper. The helper virus promotes replication of the AAV vector and expression of AAV genes from the helper plasmid. The helper plasmid is not packaged in significant amounts due to a lack of ITR sequences. Contamination with adenovirus can be reduced by, e.g., heat treatment to which adenovirus is more sensitive than AAV. Additional methods for the delivery of nucleic acids to cells are known to those skilled in the art. See, for example, US20030087817, incorporated herein by reference.

[0366] Sullivan, et al., supra, describes the general methods for delivery of enzymatic RNA molecules. Ribozymes may be administered to cells by a variety of methods known to those familiar to the art, including, but not restricted to, encapsulation in liposomes, by iontophoresis, or by incorporation into other vehicles, such as hydrogels, cyclodextrins, biodegradable nanocapsules, and bioadhesive microspheres. The RNA/vehicle combination is locally delivered by direct injection or by use of a catheter, infusion pump or stent. Alternative routes of delivery include, but are not limited to, intramuscular injection, aerosol inhalation, oral (tablet or pill form), topical, systemic, ocular, intraperitoneal and/or intrathecal delivery. More detailed descriptions of ribozyme delivery and administration are provided in Sullivan, et al., supra and Draper, et al., supra which have been incorporated by reference herein.

[0367] Another means of accumulating high concentrations of a ribozyme(s) within cells is to incorporate the ribozyme-encoding sequences into a DNA expression vector. Transcription of the ribozyme sequences are driven from a promoter for eukaryotic RNA polymerase I (pot I), RNA polymerase II (pot II), or RNA polymerase III (pot III). Transcripts from pot I or pol III promoters will be expressed at high levels in all cells; the levels of a given pol II promoter in a given cell type will depend on the nature of the gene regulatory sequences (enhancers, silencers, etc.) present nearby. Prokaryotic RNA polymerase promoters are also used, providing that the prokaryotic RNA polymerase enzyme is expressed in the appropriate cells (Elroy-Stein and Moss, 1990 Proc. Natl. Acad. Sci. USA, 87, 6743-7; Gao, and Huang, 1993 Nucleic Acids Res., 21, 2867-72; Lieber et al., 1993 Methods Enzymol., 217, 47-66; Zhou et al., 1990 Mol. Cell. Biol., 10, 4529-37). Several investigators have demonstrated that ribozymes expressed from such promoters can function in mammalian cells (e.g. Kashani-Sabet, et al., 1992 Antisense Res. Dev. 2, 3-15; Ojwang et al., 1992 Proc. Natl. Acad. Sci. USA 89, 10802-6; Chen et al., 1992 Nucleic Acids Res., 20, 4581-9; Yu et al., 1993 Proc. Natl. Acad. Sci. USA 90, 6340-4; L'Huillier, et al., 1992 EMBO J. 11, 4411-8; Lisziewicz et al., 1993 Proc. Natl. Acad. Sci. U.S.A. 90, 8000-4). The above ribozyme transcription units can be incorporated into a variety of vectors for introduction into mammalian cells, including but not restricted to, plasmid DNA vectors, viral DNA vectors (such as adenovirus or adeno-associated vectors), or viral RNA vectors (such as retroviral vectors).

### [8] Kits, Cells, Vectors, and Delivery

[0368] Kits

[0369] The compositions of the present disclosure may be assembled into kits. In some embodiments, the kit comprises nucleic acid vectors for the expression of the genome editors described herein. In other embodiments, the kit further comprises appropriate guide nucleotide sequences (e.g., guide RNAs) or nucleic acid vectors for the expression of such guide nucleotide sequences, to target the genome editors to the desired target sequence.

[0370] The kit described herein may include one or more containers housing components for performing the methods described herein and optionally instructions for use. Any of the kit described herein may further comprise components needed for performing the assay methods. Each component of the kits, where applicable, may be provided in liquid form (e.g., in solution) or in solid form, (e.g., a dry powder). In certain cases, some of the components may be reconstitutable or otherwise processible (e.g., to an active form), for example, by the addition of a suitable solvent or other species (for example, water), which may or may not be provided with the kit.

[0371] In some embodiments, the kits may optionally include instructions and/or promotion for use of the components provided. As used herein, “instructions” can define a component of instruction and/or promotion, and typically involve written instructions on or associated with packaging of the disclosure. Instructions also can include any oral or electronic instructions provided in any manner such that a user will clearly recognize that the instructions are to be associated with the kit, for example, audiovisual (e.g., videotape, DVD, directions to access online resources, etc.), Internet, and/or web-based communications, etc. The written instructions may be in a form prescribed by a governmental agency regulating the manufacture, use, or sale of pharmaceuticals or biological products, which can also reflect approval by the agency of manufacture, use or sale for animal administration. As used herein, “promoted” includes all methods of doing business including methods of education, hospital and other clinical instruction, scientific inquiry, drug discovery or development, academic research, pharmaceutical industry activity including pharmaceutical sales, and any advertising or other promotional activity including written, oral and electronic communication of any form, associated with the disclosure. Additionally, the kits may include other components depending on the specific application, as described herein.

[0372] The kits may contain any one or more of the components described herein in one or more containers. The components may be prepared sterilely, packaged in a syringe and shipped refrigerated. Alternatively it may be housed in a vial or other container for storage. A second container may have other components prepared sterilely. Alternatively the kits may include the active agents premixed and shipped in a vial, tube, or other container.

[0373] The kits may have a variety of forms, such as a blister pouch, a shrink wrapped pouch, a vacuum sealable pouch, a sealable thermoformed tray, or a similar pouch or tray form, with the accessories loosely packed within the pouch, one or more tubes, containers, a box or a bag. The kits may be sterilized after the accessories are added, thereby allowing the individual accessories in the container to be otherwise unwrapped. The kits can be sterilized using any appropriate sterilization techniques, such as radiation sterilization, heat sterilization, or other sterilization methods known in the art. The kits may also include other components, depending on the specific application, for example, containers, cell media, salts, buffers, reagents, syringes, needles, a fabric, such as gauze, for applying or removing a disinfecting agent, disposable gloves, a support for the agents prior to administration, etc. Some aspects of this disclosure provide kits comprising a nucleic acid construct comprising a nucleotide sequence encoding the various components of the genome editing system described herein (e.g., including, but not limited to, the napDNAbps, reverse transcriptases, polymerases, fusion proteins (e.g., comprising napDNAbps and reverse transcriptases (or more broadly, polymerases), extended guide RNAs, and complexes comprising fusion proteins and extended guide RNAs, as well as accessory elements, such as second strand nicking components (e.g., second strand nicking gRNA) and 5′ endogenous DNA flap removal endonucleases for helping to drive the genome editing process towards the edited product formation). In some embodiments, the nucleotide sequence(s) comprises a heterologous promoter (or more than a single promoter) that drives expression of the genome editing system components.

[0374] Other aspects of this disclosure provide kits comprising one or more nucleic acid constructs encoding the various components of the genome editing system described herein, e.g., the comprising a nucleotide sequence encoding the components of the genome editing system capable of modifying a target DNA sequence. In some embodiments, the nucleotide sequence comprises a heterologous promoter that drives expression of the genome editing system components.

[0375] Some aspects of this disclosure provides kits comprising a nucleic acid construct, comprising (a) a nucleotide sequence encoding a napDNAbp (e.g., a Cas9 domain) fused to a reverse transcriptase and (b) a heterologous promoter that drives expression of the sequence of (a).

[0376] Cells

[0377] Cells that may contain any of the compositions described herein include prokaryotic cells and eukaryotic cells. The methods described herein are used to deliver a napDNAbp or a genome editing system into a eukaryotic cell (e.g., a mammalian cell, such as a human cell). In some embodiments, the cell is in vitro (e.g., cultured cell. In some embodiments, the cell is in vivo (e.g., in a subject such as a human subject). In some embodiments, the cell is ex vivo (e.g., isolated from a subject and may be administered back to the same or a different subject).

[0378] Mammalian cells of the present disclosure include human cells, primate cells (e.g., vero cells), rat cells (e.g., GH3 cells, OC23 cells) or mouse cells (e.g., MC3T3 cells). There are a variety of human cell lines, including, without limitation, human embryonic kidney (HEK) cells, HeLa cells, cancer cells from the National Cancer Institute's 60 cancer cell lines (NCI60), DU145 (prostate cancer) cells, Lncap (prostate cancer) cells, MCF-7 (breast cancer) cells, MDA-MB-438 (breast cancer) cells, PC3 (prostate cancer) cells, T47D (breast cancer) cells, THP-1 (acute myeloid leukemia) cells, U87 (glioblastoma) cells, SHSY5Y human neuroblastoma cells (cloned from a myeloma) and Saos-2 (bone cancer) cells. In some embodiments, rAAV vectors are delivered into human embryonic kidney (HEK) cells (e.g., HEK293 or HEK293T cells). In some embodiments, rAAV vectors are delivered into stem cells (e.g., human stem cells) such as, for example, pluripotent stem cells (e.g., human pluripotent stem cells including human induced pluripotent stem cells (hiPSCs)). A stem cell refers to a cell with the ability to divide for indefinite periods in culture and to give rise to specialized cells. A pluripotent stem cell refers to a type of stem cell that is capable of differentiating into all tissues of an organism, but not alone capable of sustaining full organismal development. A human induced pluripotent stem cell refers to a somatic (e.g., mature or adult) cell that has been reprogrammed to an embryonic stem cell-like state by being forced to express genes and factors important for maintaining the defining properties of embryonic stem cells (see, e.g., Takahashi and Yamanaka, Cell 126 (4): 663-76, 2006, incorporated by reference herein). Human induced pluripotent stem cell cells express stem cell markers and are capable of generating cells characteristic of all three germ layers (ectoderm, endoderm, mesoderm).

[0379] Additional non-limiting examples of cell lines that may be used in accordance with the present disclosure include 293-T, 293-T, 3T3, 4T1, 721, 9L, A-549, A172, A20, A253, A2780, A2780ADR, A2780cis, A431, ALC, B16, B35, BCP-1, BEAS-2B, bEnd.3, BHK-21, BR 293, BxPC3, C2C12, C3H-10T1/2, C6, C6/36, Cal-27, CGR8, CHO, CML T1, CMT, COR-L23, COR-L23/5010, COR-L23/CPR, COR-L23/R23, COS-7, COV-434, CT26, D17, DH82, DU145, DuCaP, E14Tg2a, EL4, EM2, EM3, EMT6/AR1, EMT6/AR10.0, FM3, H1299, H69, HB54, HB55, HCA2, Hepa1c1c7, High Five cells, HL-60, HMEC, HT-29, HUVEC, J558L cells, Jurkat, JY cells, K562 cells, KCL22, KG1, Ku812, KYO1, LNCap, Ma-Mel 1, 2, 3 . . . 48, MC-38, MCF-10A, MCF-7, MDA-MB-231, MDA-MB-435, MDA-MB-468, MDCK II, MG63, MONO-MAC 6, MOR/0.2R, MRC5, MTD-1A, MyEnd, NALM-1, NCI-H69/CPR, NCI-H69/LX10, NCI-H69/LX20, NCI-H69/LX4, NIH-3T3, NW-145, OPCN/OPCT Peer, PNT-1A/PNT 2, PTK2, Raji, RBL cells, RenCa, RIN-5F, RMA/RMAS, S2, Saos-2 cells, Sf21, Sf9, SiHa, SKBR3, SKOV-3, T-47D, T2, T84, THP1, U373, U87, U937, VCaP, WM39, WT-49, X63, YAC-1 and YAR cells.

[0380] Some aspects of this disclosure provide cells comprising any of the constructs disclosed herein. In some embodiments, a host cell is transiently or non-transiently transfected with one or more vectors described herein. In some embodiments, a cell is transfected as it naturally occurs in a subject. In some embodiments, a cell that is transfected is taken from a subject. In some embodiments, the cell is derived from cells taken from a subject, such as a cell line. A wide variety of cell lines for tissue culture are known in the art. Examples of cell lines include, but are not limited to, C8161, CCRF-CEM, MOLT, mIMCD-3, NHDF, HeLa-S3, Huh1, Huh4, Huh7, HUVEC, HASMC, HEKn, HEKa, MiaPaCell, Panel, PC-3, TF1, CTLL-2, C1R, Rat6, CV1, RPTE, A10, T24, J82, A375, ARH-77, Calu1, SW480, SW620, SKOV3, SK-UT, CaCo2, P388D1, SEM-K2, WEHI-231, HB56, TIB55, Jurkat, J45.01, LRMB, Bcl-1, BC-3, IC21, DLD2, Raw264.7, NRK, NRK-52E, MRC5, MEF, Hep G2, HeLa B, HeLa T4, COS, COS-1, COS-6, COS-M6A, BS-C-1 monkey kidney epithelial, BALB/3T3 mouse embryo fibroblast, 3T3 Swiss, 3T3-L1, 132-d5 human fetal fibroblasts; 10.1 mouse fibroblasts, 293-T, 3T3, 721, 9L, A2780, A2780ADR, A2780cis, A 172, A20, A253, A431, A-549, ALC, B16, B35, BCP-1 cells, BEAS-2B, bEnd.3, BHK-21, BR 293. BxPC3. C3H-10T1/2, C6/36, Cal-27, CHO, CHO-7, CHO-IR, CHO-K1, CHO-K2, CHO-T, CHO Dhfr −/−, COR-L23, COR-L23/CPR, COR-L23/5010, COR-L23/R23, COS-7, COV-434, CML T1, CMT, CT26, D17, DH82, DU145, DuCaP, EL4, EM2, EM3, EMT6/AR1, EMT6/AR10.0, FM3, H1299, H69, HB54, HB55, HCA2, HEK-293, HeLa, Hepa1c1c7, HL-60, HMEC, HT-29, Jurkat, JY cells, K562 cells, Ku812, KCL22, KG1, KYO1, LNCap, Ma-Mel 1-48, MC-38, MCF-7, MCF-10A, MDA-MB-231, MDA-MB-468, MDA-MB-435, MDCK II, MDCK 11, MOR/0.2R, MONO-MAC 6, MTD-1A, MyEnd, NCI-H69/CPR, NCI-H69/LX10, NCI-H69/LX20, NCI-H69/LX4, NIH-3T3, NALM-1, NW-145, OPCN/OPCT cell lines, Peer, PNT-1A/PNT 2, RenCa, RIN-5F, RMA/RMAS, Saos-2 cells, Sf-9, SkBr3, T2, T-47D, T84, THP1 cell line, U373, U87, U937, VCaP, Vero cells, WM39, WT-49, X63, YAC-1, YAR, and transgenic varieties thereof.

[0381] Cell lines are available from a variety of sources known to those with skill in the art (see, e.g., the American Type Culture Collection (ATCC) (Manassas, Va.)). In some embodiments, a cell transfected with one or more vectors described herein is used to establish a new cell line comprising one or more vector-derived sequences. In some embodiments, a cell transiently transfected with the components of a CRISPR system as described herein (such as by transient transfection of one or more vectors, or transfection with RNA), and modified through the activity of a CRISPR complex, is used to establish a new cell line comprising cells containing the modification but lacking any other exogenous sequence. In some embodiments, cells transiently or non-transiently transfected with one or more vectors described herein, or cell lines derived from such cells are used in assessing one or more test compounds.

[0382] Vectors

[0383] Some aspects of the present disclosure relate to using recombinant virus vectors (e.g., adeno-associated virus vectors, adenovirus vectors, or herpes simplex virus vectors) for the delivery of the genome editor systems or components thereof described herein, e.g., a napDNAbp or a split napDNAbp, into a cell. In the case of delivering one or more protein components of the genome editing system using a split-molecule approach, the N-terminal portion of a genome editor protein and the C-terminal portion of a genome editor protein are delivered by separate recombinant virus vectors (e.g., adeno-associated virus vectors, adenovirus vectors, or herpes simplex virus vectors) into the same cell, since the full-length napDNAbps (e.g., Cas9) often exceed the packaging limit of various virus vectors, e.g., rAAV (˜4.9 kb).

[0384] Thus, in one embodiment, the disclosure contemplates vectors capable of delivering split genome editor proteins, or split components thereof. In some embodiments, a composition for delivering the split Cas9 protein or split genome editor into a cell (e.g., a mammalian cell, a human cell) is provided. In some embodiments, the composition of the present disclosure comprises: (i) a first recombinant adeno-associated virus (rAAV) particle comprising a first nucleotide sequence encoding a N-terminal portion of a Cas9 protein or prime editor fused at its C-terminus to an intein-N; and (ii) a second recombinant adeno-associated virus (rAAV) particle comprising a second nucleotide sequence encoding an intein-C fused to the N-terminus of a C-terminal portion of the Cas9 protein or genome editor. The rAAV particles of the present disclosure comprise a rAAV vector (i.e., a recombinant genome of the rAAV) encapsidated in the viral capsid proteins.

[0385] In some embodiments, the rAAV vector comprises: (1) a heterologous nucleic acid region comprising the first or second nucleotide sequence encoding the N-terminal portion or C-terminal portion of a split Cas9 protein or a split genome editor in any form as described herein, (2) one or more nucleotide sequences comprising a sequence that facilitates expression of the heterologous nucleic acid region (e.g., a promoter), and (3) one or more nucleic acid regions comprising a sequence that facilitate integration of the heterologous nucleic acid region (optionally with the one or more nucleic acid regions comprising a sequence that facilitates expression) into the genome of a cell. In some embodiments, viral sequences that facilitate integration comprise Inverted Terminal Repeat (ITR) sequences. In some embodiments, the first or second nucleotide sequence encoding the N-terminal portion or C-terminal portion of a split Cas9 protein or a split genome editor is flanked on each side by an ITR sequence. In some embodiments, the nucleic acid vector further comprises a region encoding an AAV Rep protein as described herein, either contained within the region flanked by ITRs or outside the region. The ITR sequences can be derived from any AAV serotype (e.g., 1, 2, 3, 4, 5, 6, 7, 8, 9, or 10) or can be derived from more than one serotype. In some embodiments, the ITR sequences are derived from AAV2 or AAV6.

[0386] Thus, in some embodiments, the rAAV particles disclosed herein comprise at least one rAAV2 particle, rAAV6 particle, rAAV8 particle, rPHP.B particle, rPHP.eB particle, or rAAV9 particle, or a variant thereof. In particular embodiments, the disclosed rAAV particles are rPHP.B particles, rPHP.eB particles, rAAV9 particles.

[0387] ITR sequences and plasmids containing ITR sequences are known in the art and commercially available (see, e.g., products and services available from Vector Biolabs, Philadelphia, Pa.; Cellbiolabs, San Diego, Calif.; Agilent Technologies, Santa Clara, Ca; and Addgene, Cambridge, Mass.; and Gene delivery to skeletal muscle results in sustained expression and systemic delivery of a therapeutic protein. Kessler P D, Podsakoff G M, Chen X, McQuiston S A, Colosi P C, Matelis L A, Kurtzman G J, Byrne B J. Proc Natl Acad Sci USA. 1996 Nov. 26; 93(24):14082-7; and Curtis A. Machida. Methods in Molecular Medicine™. Viral Vectors for Gene Therapy Methods and Protocols. 10.1385/1-59259-304-6:201 © Humana Press Inc. 2003. Chapter 10. Targeted Integration by Adeno-Associated Virus. Matthew D. Weitzman, Samuel M. Young Jr., Toni Cathomen and Richard Jude Samulski; U.S. Pat. Nos. 5,139,941 and 5,962,313, all of which are incorporated herein by reference).

[0388] In some embodiments, the rAAV vector of the present disclosure comprises one or more regulatory elements to control the expression of the heterologous nucleic acid region (e.g., promoters, transcriptional terminators, and/or other regulatory elements). In some embodiments, the first and/or second nucleotide sequence is operably linked to one or more (e.g., 1, 2, 3, 4, 5, or more) transcriptional terminators. Non-limiting examples of transcriptional terminators that may be used in accordance with the present disclosure include transcription terminators of the bovine growth hormone gene (bGH), human growth hormone gene (hGH), SV40, CW3, ϕ, or combinations thereof. The efficiencies of several transcriptional terminators have been tested to determine their respective effects in the expression level of the split Cas9 protein or the split genome editor. In some embodiments, the transcriptional terminator used in the present disclosure is a bGH transcriptional terminator. In some embodiments, the rAAV vector further comprises a Woodchuck Hepatitis Virus Posttranscriptional Regulatory Element (WPRE). In certain embodiments, the WPRE is a truncated WPRE sequence, such as “W3.” In some embodiments, the WPRE is inserted 5′ of the transcriptional terminator. Such sequences, when transcribed, create a tertiary structure which enhances expression, in particular, from viral vectors.

[0389] In some embodiments, the vectors used herein may encode the genome editors, or any of the components thereof (e.g., napDNAbp, linkers, or other functional domains). In addition, the vectors used herein may encode the guide RNAs. The vectors may be capable of driving expression of one or more coding sequences in a cell. In some embodiments, the cell may be a prokaryotic cell, such as, e.g., a bacterial cell. In some embodiments, the cell may be a eukaryotic cell, such as, e.g., a yeast, plant, insect, or mammalian cell. In some embodiments, the eukaryotic cell may be a mammalian cell. In some embodiments, the eukaryotic cell may be a rodent cell. In some embodiments, the eukaryotic cell may be a human cell. Suitable promoters to drive expression in different types of cells are known in the art. In some embodiments, the promoter may be wild-type. In other embodiments, the promoter may be modified for more efficient or efficacious expression. In yet other embodiments, the promoter may be truncated yet retain its function. For example, the promoter may have a normal size or a reduced size that is suitable for proper packaging of the vector into a virus.

[0390] In some embodiments, the promoters that may be used in the genome editor vectors may be constitutive, inducible, or tissue-specific. In some embodiments, the promoters may be a constitutive promoters. Non-limiting exemplary constitutive promoters include cytomegalovirus immediate early promoter (CMV), simian virus (SV40) promoter, adenovirus major late (MLP) promoter, Rous sarcoma virus (RSV) promoter, mouse mammary tumor virus (MMTV) promoter, phosphoglycerate kinase (PGK) promoter, elongation factor-alpha (EFla) promoter, ubiquitin promoters, actin promoters, tubulin promoters, immunoglobulin promoters, a functional fragment thereof, or a combination of any of the foregoing. In some embodiments, the promoter may be a CMV promoter. In some embodiments, the promoter may be a truncated CMV promoter. In other embodiments, the promoter may be an EFla promoter. In some embodiments, the promoter may be an inducible promoter. Non-limiting exemplary inducible promoters include those inducible by heat shock, light, chemicals, peptides, metals, steroids, antibiotics, or alcohol. In some embodiments, the inducible promoter may be one that has a low basal (non-induced) expression level, such as, e.g., the Tet-On® promoter (Clontech). In some embodiments, the promoter may be a tissue-specific promoter. In some embodiments, the tissue-specific promoter is exclusively or predominantly expressed in liver tissue. Non-limiting exemplary tissue-specific promoters include B29 promoter, CD14 promoter, CD43 promoter, CD45 promoter, CD68 promoter, desmin promoter, elastase-1 promoter, endoglin promoter, fibronectin promoter, Flt-1 promoter, GFAP promoter, GPIIb promoter, ICAM-2 promoter, INF-β promoter, Mb promoter, Nphsl promoter, OG-2 promoter, SP-B promoter, SYN1 promoter, and WASP promoter.

[0391] In some embodiments, the genome editor vectors (e.g., including any vectors encoding any genome editor fusion protein and/or the guide RNAs) may comprise inducible promoters to start expression only after it is delivered to a target cell. Non-limiting exemplary inducible promoters include those inducible by heat shock, light, chemicals, peptides, metals, steroids, antibiotics, or alcohol. In some embodiments, the inducible promoter may be one that has a low basal (non-induced) expression level, such as, e.g., the Tet-On® promoter (Clontech).

[0392] In additional embodiments, the genome editor vectors (e.g., including any vectors encoding the genome editor fusion proteins and/or the guide RNAs) may comprise tissue-specific promoters to start expression only after it is delivered into a specific tissue. Non-limiting exemplary tissue-specific promoters include B29 promoter, CD14 promoter, CD43 promoter, CD45 promoter, CD68 promoter, desmin promoter, elastase-1 promoter, endoglin promoter, fibronectin promoter, Flt-1 promoter, GFAP promoter, GPIIb promoter, ICAM-2 promoter, INF-β promoter, Mb promoter, Nphsl promoter, OG-2 promoter, SP-B promoter, SYN1 promoter, and WASP promoter.

[0393] In some embodiments, the nucleotide sequence encoding the guide RNAs may be operably linked to at least one transcriptional or translational control sequence. In some embodiments, the nucleotide sequence encoding the guide RNAs may be operably linked to at least one promoter. In some embodiments, the promoter may be recognized by RNA polymerase III (Pol III). Non-limiting examples of Pol III promoters include U6, HI and tRNA promoters. In some embodiments, the nucleotide sequence encoding the guide RNA may be operably linked to a mouse or human U6 promoter. In other embodiments, the nucleotide sequence encoding the guide RNA may be operably linked to a mouse or human HI promoter. In some embodiments, the nucleotide sequence encoding the guide RNA may be operably linked to a mouse or human tRNA promoter. In embodiments with more than one guide RNA, the promoters used to drive expression may be the same or different. In some embodiments, the nucleotide encoding the crRNA of the guide RNA and the nucleotide encoding the tracr RNA of the guide RNA may be provided on the same vector. In some embodiments, the nucleotide encoding the crRNA and the nucleotide encoding the tracr RNA may be driven by the same promoter. In some embodiments, the crRNA and tracr RNA may be transcribed into a single transcript. For example, the crRNA and tracr RNA may be processed from the single transcript to form a double-molecule guide RNA. Alternatively, the crRNA and tracr RNA may be transcribed into a single-molecule guide RNA.

[0394] In some embodiments, the nucleotide sequence encoding the guide RNA may be located on the same vector comprising the nucleotide sequence encoding the PE fusion protein. In some embodiments, expression of the guide RNA and of the PE fusion protein may be driven by their corresponding promoters. In some embodiments, expression of the guide RNA may be driven by the same promoter that drives expression of a genome editor fusion protein. In some embodiments, the guide RNA and a genome editor fusion protein transcript may be contained within a single transcript. For example, the guide RNA may be within an untranslated region (UTR) of the Cas9 protein transcript. In some embodiments, the guide RNA may be within the 5′ UTR of a genome editor fusion protein transcript. In other embodiments, the guide RNA may be within the 3′ UTR of a genome editor fusion protein transcript. In some embodiments, the intracellular half-life of a genome editor fusion protein transcript may be reduced by containing the guide RNA within its 3′ UTR and thereby shortening the length of its 3′ UTR. In additional embodiments, the guide RNA may be within an intron of a genome editor fusion protein transcript. In some embodiments, suitable splice sites may be added at the intron within which the guide RNA is located such that the guide RNA is properly spliced out of the transcript. In some embodiments, expression of the Cas9 protein and the guide RNA in close proximity on the same vector may facilitate more efficient formation of the CRISPR complex.

[0395] The vectors used to deliver and express the genome editing system may comprise one vector, or two vectors, or three vectors, or four vectors, or five vector, or more. In some embodiments, the vector system may comprise one single vector, which encodes both the napDNAbp domain, the guide RNA, and the ribozyme component. In other embodiments, the vector system may comprise two vectors, wherein one vector encodes the napDNAbp component and the other encodes RNA components (i.e., the guide RNA and the ribozyme component). In additional embodiments, the vector system may comprise three vectors, wherein each vector encodes a component of the genome editing system, i.e., one vector to express the napDNAbp component, one vector to express the guide RNA component, and another vector to express the ribozyme component.

[0396] In some embodiments, the composition comprising the rAAV particle (in any form contemplated herein) further comprises a pharmaceutically acceptable carrier. In some embodiments, the composition is formulated in appropriate pharmaceutical vehicles for administration to human or animal subjects.

[0397] Some examples of materials which can serve as pharmaceutically-acceptable carriers include: (1) sugars, such as lactose, glucose and sucrose; (2) starches, such as corn starch and potato starch; (3) cellulose, and its derivatives, such as sodium carboxymethyl cellulose, methylcellulose, ethyl cellulose, microcrystalline cellulose and cellulose acetate; (4) powdered tragacanth; (5) malt; (6) gelatin; (7) lubricating agents, such as magnesium stearate, sodium lauryl sulfate and talc; (8) excipients, such as cocoa butter and suppository waxes; (9) oils, such as peanut oil, cottonseed oil, safflower oil, sesame oil, olive oil, corn oil and soybean oil; (10) glycols, such as propylene glycol; (11) polyols, such as glycerin, sorbitol, mannitol and polyethylene glycol (PEG); (12) esters, such as ethyl oleate and ethyl laurate; (13) agar; (14) buffering agents, such as magnesium hydroxide and aluminum hydroxide; (15) alginic acid; (16) pyrogen-free water; (17) isotonic saline; (18) Ringer's solution; (19) ethyl alcohol; (20) pH buffered solutions; (21) polyesters, polycarbonates and/or polyanhydrides; (22) bulking agents, such as polypeptides and amino acids (23) serum component, such as serum albumin, HDL and LDL; (22) C2-C12 alcohols, such as ethanol; and (23) other non-toxic compatible substances employed in pharmaceutical formulations. Wetting agents, coloring agents, release agents, coating agents, sweetening agents, flavoring agents, perfuming agents, preservative and antioxidants can also be present in the formulation. The terms such as “excipient”, “carrier”, “pharmaceutically acceptable carrier” or the like are used interchangeably herein.

[0398] Delivery Methods

[0399] In some aspects, the invention provides methods comprising delivering one or more polynucleotides, such as or one or more vectors as described herein, one or more transcripts thereof, and/or one or proteins transcribed therefrom, to a host cell. In some aspects, the invention further provides cells produced by such methods, and organisms (such as animals, plants, or fungi) comprising or produced from such cells. In some embodiments, a genome editor as described herein in combination with (and optionally complexed with) a guide sequence is delivered to a cell.

[0400] Exemplary delivery strategies for delivering and expressing a genome editing system within a cell are described herein elsewhere, which include vector-based strategies, ribonucleoprotein complex delivery, and delivery of a genome editing system by mRNA methods.

[0401] In some embodiments, the method of delivery provided comprises nucleofection, microinjection, biolistics, virosomes, liposomes, immunoliposomes, polycation or lipid:nucleic acid conjugates, naked DNA, artificial virions, and agent-enhanced uptake of DNA.

[0402] Exemplary methods of delivery of nucleic acids include lipofection, nucleofection, electoporation, stable genome integration (e.g., piggybac), microinjection, biolistics, virosomes, liposomes, immunoliposomes, polycation or lipid:nucleic acid conjugates, naked DNA, artificial virions, and agent-enhanced uptake of DNA. Lipofection is described in e.g., U.S. Pat. Nos. 5,049,386, 4,946,787; and 4,897,355) and lipofection reagents are sold commercially (e.g., Transfectam™, Lipofectin™ and SF Cell Line 4D-Nucleofector X Kit™ (Lonza)). Cationic and neutral lipids that are suitable for efficient receptor-recognition lipofection of polynucleotides include those of Feigner, WO 91/17424; WO 91/16024. Delivery may be to cells (e.g. in vitro or ex vivo administration) or target tissues (e.g. in vivo administration). Delivery may be achieved through the use of RNP complexes.

[0403] The preparation of lipid:nucleic acid complexes, including targeted liposomes such as immunolipid complexes, is well known to one of skill in the art (see, e.g., Crystal, Science 270:404-410 (1995); Blaese et al., Cancer Gene Ther. 2:291-297 (1995); Behr et al., Bioconjugate Chem. 5:382-389 (1994); Remy et al., Bioconjugate Chem. 5:647-654 (1994); Gao et al., Gene Therapy 2:710-722 (1995); Ahmad et al., Cancer Res. 52:4817-4820 (1992); U.S. Pat. Nos. 4,186,183, 4,217,344, 4,235,871, 4,261,975, 4,485,054, 4,501,728, 4,774,085, 4,837,028, and 4,946,787).

[0404] In other embodiments, the method of delivery and vector provided herein is an RNP complex. RNP delivery of fusion proteins markedly increases the DNA specificity of genome editing. RNP delivery of fusion proteins leads to decoupling of on- and off-target DNA editing. RNP delivery ablates off-target editing at non-repetitive sites while maintaining on-target editing comparable to plasmid delivery, and greatly reduces off-target DNA editing even at the highly repetitive VEGFA site 2. See Rees, H. A. et al., Improving the DNA specificity and applicability of base editing through protein engineering and protein delivery, Nat. Commun. 8, 15790 (2017), U.S. Pat. No. 9,526,784, issued Dec. 27, 2016, and U.S. Pat. No. 9,737,604, issued Aug. 22, 2017, each of which is incorporated by reference herein. Since the herein disclosed genome editing system involves not only a guide RNA, but also a ribozyme, delivery of the genome editing systems described herein may have improved efficiency by way of RNP delivery since the negative charge of both the guide RNA and the ribozyme combined with the napDNAbp component may facilitate entry into the cell better than RNP comprising the napDNAbp/guide RNA complex alone. The additional negative charge of the ribozyme component facilitates entry of the RNP complex.

[0405] Additional methods for the delivery of nucleic acids to cells are known to those skilled in the art. See, for example, US 2003/0087817, incorporated herein by reference.

[0406] Other aspects of the present disclosure provide methods of delivering the prime editor constructs into a cell to form a complete and functional prime editor within a cell. For example, in some embodiments, a cell is contacted with a composition described herein (e.g., compositions comprising nucleotide sequences encoding the split Cas9 or the split genome editor components or AAV particles containing nucleic acid vectors comprising such nucleotide sequences). In some embodiments, the contacting results in the delivery of such nucleotide sequences into a cell, wherein the N-terminal portion of the Cas9 protein or the genome editor and the C-terminal portion of the Cas9 protein or the genome editor are expressed in the cell and are joined to form a complete Cas9 protein or a complete genome editor.

[0407] It should be appreciated that any rAAV particle, nucleic acid molecule or composition provided herein may be introduced into the cell in any suitable way, either stably or transiently. In some embodiments, the disclosed proteins may be transfected into the cell. In some embodiments, the cell may be transduced or transfected with a nucleic acid molecule. For example, a cell may be transduced (e.g., with a virus encoding a split protein), or transfected (e.g., with a plasmid encoding a split protein) with a nucleic acid molecule that encodes a split protein, or an rAAV particle containing a viral genome encoding one or more nucleic acid molecules. Such transduction may be a stable or transient transduction. In some embodiments, cells expressing a split protein or containing a split protein may be transduced or transfected with one or more guide RNA sequences, for example in delivery of a split Cas9 (e.g., nCas9) protein. In some embodiments, a plasmid expressing a split protein may be introduced into cells through electroporation, transient (e.g., lipofection) and stable genome integration (e.g., piggybac) and viral transduction or other methods known to those of skill in the art.

[0408] In certain embodiments, the compositions provided herein comprise a lipid and/or polymer. In certain embodiments, the lipid and/or polymer is cationic. The preparation of such lipid particles is well known. See, e.g. U.S. Pat. Nos. 4,880,635; 4,906,477; 4,911,928; 4,917,951; 4,920,016; 4,921,757; and 9,737,604, each of which is incorporated herein by reference.

[0409] The guide RNA sequence may be 15-100 nucleotides in length and comprise a sequence of at least 10, at least 15, or at least 20 contiguous nucleotides that is complementary to a target nucleotide sequence. The guide RNA may comprise a sequence of 15, 16, 17, 18, 19, 20, 21, 22, 23, 24, 25, 26, 27, 28, 29, 30, 31, 32, 33, 34, 35, 36, 37, 38, 39, or 40 contiguous nucleotides that is complementary to a target nucleotide sequence. The guide RNA may be 15, 16, 17, 18, 19, 20, 21, 22, 23, 24, 25, 26, 27, 28, 29, 30, 31, 32, 33, 34, 35, 36, 37, 38, 39, 40, 41, 42, 43, 44, 45, 46, 47, 48, 49, or 50 nucleotides in length.

[0410] In some embodiments, the target nucleotide sequence is a DNA sequence in a genome, e.g. a eukaryotic genome. In certain embodiments, the target nucleotide sequence is in a mammalian (e.g. a human) genome.

[0411] The compositions of this disclosure may be administered or packaged as a unit dose, for example. The term “unit dose” when used in reference to a pharmaceutical composition of the present disclosure refers to physically discrete units suitable as unitary dosage for the subject, each unit containing a predetermined quantity of active material calculated to produce the desired therapeutic effect in association with the required diluent, i.e., a carrier or vehicle.

[0412] Treatment of a disease or disorder includes delaying the development or progression of the disease, or reducing disease severity. Treating the disease does not necessarily require curative results.

[0413] As used therein, “delaying” the development of a disease means to defer, hinder, slow, retard, stabilize, and/or postpone progression of the disease. This delay can be of varying lengths of time, depending on the history of the disease and/or individuals being treated. A method that “delays” or alleviates the development of a disease, or delays the onset of the disease, is a method that reduces probability of developing one or more symptoms of the disease in a given time frame and/or reduces extent of the symptoms in a given time frame, when compared to not using the method. Such comparisons are typically based on clinical studies, using a number of subjects sufficient to give a statistically significant result.

[0414] “Development” or “progression” of a disease means initial manifestations and/or ensuing progression of the disease. Development of the disease can be detectable and assessed using standard clinical techniques as well known in the art. However, development also refers to progression that may be undetectable. For purpose of this disclosure, development or progression refers to the biological course of the symptoms. “Development” includes occurrence, recurrence, and onset.

[0415] As used herein “onset” or “occurrence” of a disease includes initial onset and/or recurrence. Conventional methods, known to those of ordinary skill in the art of medicine, can be used to administer the isolated polypeptide or pharmaceutical composition to the subject, depending upon the type of disease to be treated or the site of the disease.

[0416] Without further elaboration, it is believed that one skilled in the art can, based on the above description, utilize the present disclosure to its fullest extent. The following specific embodiments are, therefore, to be construed as merely illustrative, and not limitative of the remainder of the disclosure in any way whatsoever. All publications cited herein are incorporated by reference for the purposes or subject matter referenced herein.

### REFERENCES

[0417] The following references are each incorporated herein by reference in their entireties.
[0418] 1. Jinek, M. et al. A Programmable Dual-RNA-Guided DNA Endonuclease in Adaptive Bacterial Immunity. Science 337, 816-821 (2012).
[0419] 2. Cong, L. et al. Multiplex Genome Engineering Using CRISPR/Cas Systems. Science 339, 819-823 (2013).
[0420] 3. Komor, A. C., Badran, A. H. & Liu, D. R. CRISPR-Based Technologies for the Manipulation of Eukaryotic Genomes. Cell 168, 20-36 (2017).
[0421] 4. Komor, A. C., Kim, Y. B., Packer, M. S., Zuris, J. A. & Liu, D. R. Programmable editing of a target base in genomic DNA without double-stranded DNA cleavage. Nature 533, 420-424 (2016).
[0422] 5. Nishida, K. et al. Targeted nucleotide editing using hybrid prokaryotic and vertebrate adaptive immune systems. Science 353, aaf8729 (2016).
[0423] 6. Gaudelli, N. M. et al. Programmable base editing of A⋅T to G⋅C in genomic DNA without DNA cleavage. Nature 551, 464-471 (2017).
[0424] 7. Stenson, P. D. et al. The Human Gene Mutation Database: towards a comprehensive repository of inherited mutation data for medical research, genetic diagnosis and next-generation sequencing studies. Hum. Genet. 136, 665-677 (2017).
[0425] 8. Dunbar, C. E. et al. Gene therapy comes of age. Science 359, eaan4672 (2018).
[0426] 9. Cox, D. B. T., Platt, R. J. & Zhang, F. Therapeutic genome editing: prospects and challenges. Nat. Med. 21, 121-131 (2015).
[0427] 10. Adli, M. The CRISPR tool kit for genome editing and beyond. Nat. Commun. 9, 1911 (2018).
[0428] 11. Kleinstiver, B. P. et al. Engineered CRISPR-Cas9 nucleases with altered PAM specificities. Nature 523, 481-485 (2015).
[0429] 12. Kleinstiver, B. P. et al. High-fidelity CRISPR-Cas9 nucleases with no detectable genome-wide off-target effects. Nature 529, 490-495 (2016).
[0430] 13. Hu, J. H. et al. Evolved Cas9 variants with broad PAM compatibility and high DNA specificity. Nature 556, 57-63 (2018).
[0431] 14. Nishimasu, H. et al. Engineered CRISPR-Cas9 nuclease with expanded targeting space. Science 361, 1259-1262 (2018).
[0432] 15. Jasin, M. & Rothstein, R. Repair of strand breaks by homologous recombination. Cold Spring Harb. Perspect. Biol. 5, a012740 (2013).
[0433] 16. Paquet, D. et al. Efficient introduction of specific homozygous and heterozygous mutations using CRISPR/Cas9. Nature 533, 125-129 (2016).
[0434] 17. Kosicki, M., Tomberg, K. & Bradley, A. Repair of double-strand breaks induced by CRISPR-Cas9 leads to large deletions and complex rearrangements. Nat. Biotechnol. 36, 765-771 (2018).
[0435] 18. Haapaniemi, E., Botla, S., Persson, J., Schmierer, B. & Taipale, J. CRISPR-Cas9 genome editing induces a p53-mediated DNA damage response. Nat. Med. 24, 927-930 (2018).
[0436] 19. Ihry, R. J. et al. p53 inhibits CRISPR-Cas9 engineering in human pluripotent stem cells. Nat. Med. 24, 939-946 (2018).
[0437] 20. Richardson, C. D., Ray, G. J., DeWitt, M. A., Curie, G. L. & Corn, J. E. Enhancing homology-directed genome editing by catalytically active and inactive CRISPR-Cas9 using asymmetric donor DNA. Nat. Biotechnol. 34, 339-344 (2016).
[0438] 21. Srivastava, M. et al. An Inhibitor of Nonhomologous End-Joining Abrogates Double-Strand Break Repair and Impedes Cancer Progression. Cell 151, 1474-1487 (2012).
[0439] 22. Chu, V. T. et al. Increasing the efficiency of homology-directed repair for CRISPR-Cas9-induced precise gene editing in mammalian cells. Nat. Biotechnol. 33, 543-548 (2015).
[0440] 23. Maruyama, T. et al. Increasing the efficiency of precise genome editing with CRISPR-Cas9 by inhibition of nonhomologous end joining. Nat. Biotechnol. 33, 538-542 (2015).
[0441] 24. Kim, Y. B. et al. Increasing the genome-targeting scope and precision of base editing with engineered Cas9-cytidine deaminase fusions. Nat. Biotechnol. 35, 371-376 (2017).
[0442] 25. Li, X. et al. Base editing with a Cpf1-cytidine deaminase fusion. Nat. Biotechnol. 36, 324-327 (2018).
[0443] 26. Gehrke, J. M. et al. An APOBEC3A-Cas9 base editor with minimized bystander and off-target activities. Nat. Biotechnol. (2018). doi:10.1038/nbt.4199
[0444] 27. Rees, H. A. & Liu, D. R. Base editing: precision chemistry on the genome and transcriptome of living cells. Nat. Rev. Genet. 1 (2018). doi:10.1038/s41576-018-0059-1.
[0445] 28. Ostertag, E. M. & Kazazian Jr, H. H. Biology of Mammalian L1 Retrotransposons. Annu. Rev. Genet. 35, 501-538 (2001).
[0446] 29. Zimmerly, S., Guo, H., Perlman, P. S. & Lambowltz, A. M. Group II intron mobility occurs by target DNA-primed reverse transcription. Cell 82, 545-554 (1995).
[0447] 30. Luan, D. D., Korman, M. H., Jakubczak, J. L. & Eickbush, T. H. Reverse transcription of R2Bm RNA is primed by a nick at the chromosomal target site: a mechanism for non-LTR retrotransposition. Cell 72, 595-605 (1993).
[0448] 31. Feng, Q., Moran, J. V., Kazazian, H. H. & Boeke, J. D. Human L1 retrotransposon encodes a conserved endonuclease required for retrotransposition. Cell 87, 905-916 (1996).
[0449] 32. Jinek, M. et al. Structures of Cas9 Endonucleases Reveal RNA-Mediated Conformational Activation. Science 343, 1247997 (2014).
[0450] 33. Jiang, F. et al. Structures of a CRISPR-Cas9 R-loop complex primed for DNA cleavage. Science aad8282 (2016). doi:10.1126/science.aad8282
[0451] 34. Qi, L. S. et al. Repurposing CRISPR as an RNA-Guided Platform for Sequence-Specific Control of Gene Expression. Cell 152, 1173-1183 (2013).
[0452] 35. Tang, W., Hu, J. H. & Liu, D. R. Aptazyme-embedded guide RNAs enable ligand-responsive genome editing and transcriptional activation. Nat. Commun. 8, 15939 (2017).
[0453] 36. Shechner, D. M., Hacisuleyman, E., Younger, S. T. & Rinn, J. L. Multiplexable, locus-specific targeting of long RNAs with CRISPR-Display. Nat. Methods 12, 664-670 (2015).
[0454] 37. Anders, C. & Jinek, M. Chapter One—In Vitro Enzymology of Cas9. in Methods in Enzymology (eds. Doudna, J. A. & Sontheimer, E. J.) 546, 1-20 (Academic Press, 2014).
[0455] 38. Briner, A. E. et al. Guide RNA Functional Modules Direct Cas9 Activity and Orthogonality. Mol. Cell 56, 333-339 (2014).
[0456] 39. Nowak, C. M., Lawson, S., Zerez, M. & Bleris, L. Guide RNA engineering for versatile Cas9 functionality. Nucleic Acids Res. 44, 9555-9564 (2016).
[0457] 40. Sternberg, S. H., Redding, S., Jinek, M., Greene, E. C. & Doudna, J. A. DNA interrogation by the CRISPR RNA-guided endonuclease Cas9. Nature 507, 62-67 (2014).
[0458] 41. Mohr, S. et al. Thermostable group II intron reverse transcriptase fusion proteins and their use in cDNA synthesis and next-generation RNA sequencing. RNA 19, 958-970 (2013).
[0459] 42. Stamos, J. L., Lentzsch, A. M. & Lambowitz, A. M. Structure of a Thermostable Group II Intron Reverse Transcriptase with Template-Primer and Its Functional and Evolutionary Implications. Mol. Cell 68, 926-939.e4 (2017).
[0460] 43. Zhao, C. & Pyle, A. M. Crystal structures of a group II intron maturase reveal a missing link in spliceosome evolution. Nat. Struct. Mol. Biol. 23, 558-565 (2016).
[0461] 44. Zhao, C., Liu, F. & Pyle, A. M. An ultraprocessive, accurate reverse transcriptase encoded by a metazoan group II intron. RNA 24, 183-195 (2018).
[0462] 45. Ran, F. A. et al. Genome engineering using the CRISPR-Cas9 system. Nat. Protoc. 8, 2281-2308 (2013).
[0463] 46. Liu, Y., Kao, H.-I. & Bambara, R. A. Flap endonuclease 1: a central component of DNA metabolism. Annu. Rev. Biochem. 73, 589-615 (2004).
[0464] 47. Krokan, H. E. & Bjørås, M. Base Excision Repair. Cold Spring Harb. Perspect. Biol. 5, (2013).
[0465] 48. Kelman, Z. PCNA: structure, functions and interactions. Oncogene 14, 629-640 (1997).
[0466] 49. Choe, K. N. & Moldovan, G.-L. Forging Ahead through Darkness: PCNA, Still the Principal Conductor at the Replication Fork. Mol. Cell 65, 380-392 (2017).
[0467] 50. Li, X., Li, J., Harrington, J., Lieber, M. R. & Burgers, P. M. Lagging strand DNA synthesis at the eukaryotic replication fork involves binding and stimulation of FEN-1 by proliferating cell nuclear antigen. J. Biol. Chem. 270, 22109-22112 (1995).
[0468] 51. Tom, S., Henricksen, L. A. & Bambara, R. A. Mechanism whereby proliferating cell nuclear antigen stimulates flap endonuclease 1. J. Biol. Chem. 275, 10498-10505 (2000).
[0469] 52. Tanenbaum, M. E., Gilbert, L. A., Qi, L. S., Weissman, J. S. & Vale, R. D. A protein-tagging system for signal amplification in gene expression and fluorescence imaging. Cell 159, 635-646 (2014).
[0470] 53. Bertrand, E. et al. Localization of ASH1 mRNA particles in living yeast. Mol. Cell 2, 437-445 (1998).
[0471] 54. Dahlman, J. E. et al. Orthogonal gene knockout and activation with a catalytically active Cas9 nuclease. Nat. Biotechnol. 33, 1159-1161 (2015).
[0472] 55. Tsai, S. Q. et al. GUIDE-seq enables genome-wide profiling of off-target cleavage by CRISPR-Cas nucleases. Nat. Biotechnol. 33, 187-197 (2015).
[0473] 56. Tsai, S. Q. et al. CIRCLE-seq: a highly sensitive in vitro screen for genome-wide CRISPR-Cas9 nuclease off-targets. Nat. Methods 14, 607-614 (2017).

### EXAMPLES

### Example 1. Modification of Double-Stranded DNA by Way of Ribozyme-Mediated Cas9-Based Genome Editing

[0474] The ability to site-specifically insert a nucleotide into DNA or RNA could enable the targeted repair of frameshift mutations in an analogous manner to the repair of point mutations by base-editing technologies. An RNA enzyme, or ribozyme, could readily serve as a means to site-specifically incorporate a nucleotide into DNA or RNA. The use of self-splicing group I introns as in vitro RNA editing agents has been well-precedented. Additionally, a ribozyme-based genome editing agent has a number of other advantages when compared to protein-based enzymes. First, the ribozyme is almost certain to be significantly smaller in size than a protein enzyme, making it likely less immunogenic and easier to deliver within size-limited viral vectors. Second, a ribozyme could be tailored to a specific genetic site, conferring added specificity and preventing the insertion of multiple nucleotides.

[0475] The goal of this work was to develop an RNA-based insertase capable of site-specifically inserting a single nucleotide into DNA, thus enabling the repair of frameshift mutations and potentially leading to the ability to correct a wide variety of mutations that underlie genetic diseases such as CDD. Additionally, the use of a ribozyme to perform genome editing is unprecedented and this work could pioneer a new subfield of genome editing, enabling the potential correction and treatment of other types of genetic diseases.

[0476] It was hypothesized that the Tetrahymena group I intron (FIG. 1A) would serve as a promising scaffold for the design of a ribozyme insertase. The group I intron splices itself out of mRNA via a two-step mechanism. First, it binds GTP and inserts it into the 5′ splice site, resulting in the cleavage of the transcript. Next, it undergoes a conformational change that brings the 5′ and 3′ splice sites in close proximity, followed by catalyzing the nucleophilic attack of the free 2′-hydroyxl at the 5′ splice site into the 3′ splice site (FIG. 1B). Importantly, previous efforts by Joyce and coworkers in the 1990s resulted in an evolved Tetrahymena group I ribozyme that could bind and cleave single-stranded DNA, as well as RNA (see section 2 of this document). By further modifying this scaffold a ribozyme could be generated that could site-specifically insert GTP into DNA.

[0477] The insertion of a nucleotide into DNA results in a nicked intermediate. If not repaired, that nick will result in the removal of the inserted nucleotide by the intrinsic DNA repair machinery of the cell. As such, it is critical that the DNA be re-ligated shortly after insertion. It was hypothesized that it would be possible for the Tetrahymena ribozyme to not only insert a nucleotide into DNA but also ligate that nucleotide into place (FIG. 2A). Despite being formed of different biopolymers, the active site of the Tetrahymena ribozyme and E. coli DNA polymerase are strikingly similar (FIG. 2B). The major difference is the positioning of substrate nucleotide within the binding pocket; in the Tetrahymena ribozyme, the nucleotide is positioned such that it is removed from the substrate following splicing, while in the ligase, it is positioned such that a pyrophosphate leaving group is removed and the nucleotide attached to the growing DNA strand. By allowing the DNA substrate to shift position within the binding site following the insertion of GTP through judicious engineering of the ribozyme-substrate pairing element (P0; FIGS. 2C and D), the enzyme could ligate the resulting nick.

[0478] To determine if the modified ribozyme was capable of inserting a single nucleotide into DNA, a 5′-radiolabled DNA substrate was added and monitored the reaction via polyacrylamide gel electrophoresis (PAGE). The appearance of a band equivalent in size to an authentic product was observed, suggesting that the modified ribozyme was indeed effective (FIG. 3A). High-throughput sequencing (HTS) indicated that a single G nucleotide had been incorporated at the desired side. In vitro yields approached 75%, with greater than 99% purity (FIG. 3A), demonstrating that the modified ribozyme is a good starting point for the design and evolution of an insertase.

[0479] A significant challenge associated with the shifting strategy employed is that it could potentially limit the number of DNA sequences that are targetable with this approach. For this strategy to be effective, the target DNA substrate must be able to base pair to the ribozyme both before and after the addition of a G nucleotide (FIG. 2D). To overcome this barrier, ribozyme was further modified by adding an extra, initially unpaired nucleotide within the substrate pairing element and increasing its overall length, thus reducing the number of nucleotides that need to shift during the reaction from 6 to 3 (FIG. 3B), potentially improving the number of targetable sequences by 64-fold. Robust insertion of a G nucleotide was observed with these modified ribozymes by PAGE (FIG. 3C). It may also be possible to engineer and/or evolve the ribozyme to accept an extra nucleotide closer to the active site, further dramatically improving substrate specificity.

[0480] The next goal was to design a system whereby the ribozyme could insert a nucleotide into double-stranded DNA (dsDNA) in vitro. Unsurprisingly, the modified ribozyme, like virtually all natural and evolved ribozymes, was not be able to act on a dsDNA substrate (data not shown). However, by targeting the ribozyme to a stretch of DNA rendered single-stranded upon being bound by a Cas9:sgRNA complex, it was reasoned it might be possible to overcome this challenge. It was hypothesized that there are two key considerations that would govern the ability of the ribozyme to recognize its target. First, the ssDNA target must be long enough to enable binding, which we estimate to require roughly 10-20 nucleotides. This is potentially longer that that unveiled by a single Cas9 binding event. Therefore, we decided to target Cas9 to either side of the ribozyme binding site, theoretically increasing the amount of ssDNA unveiled (FIG. 4). Second, binding of the ribozyme to the target will occur via the formation of an RNA-DNA duplex, which will in turn induce local supercoiling of the ssDNA on either side of the duplex. This supercoiling will be highly entropically and enthalpically unstable. In biology, supercoiling in plasmids is released when topoisomerase nicks the plasmid, allowing the two strands to unwind. it was hypothesized that using a nicking Cas9 (nCas9) which cuts only one of the DNA strands could have a similar effect. In addition, nicking of the non-targeted strand will likely be necessary for effective genome editing in cells. To mimic the effect of a nCas9 and simplify initial assays, synthetic dsDNA substrates were used that contain nicks at the precise location where Cas9 would cut once bound. Upon incorporating these effects, robust insertion of a single G nucleotide was observed at several synthetic dsDNA substrates where the distances between the Cas9 binding sites and ribozyme target site was varied, with yields approached 50% and product purity greater than 95% (FIG. 5).

[0481] Following these experiments, it was next sought to determine whether the ribozyme:Cas9 system would be active in human cells (via the scheme shown in FIG. 6A). Upon transfecting plasmids that encode the components of this system to HEK293T cells, however, no editing activity was observed at sites targeted by the sgRNA and ribozyme (FIG. 6B). It was speculated that this might be due to an inability of the ribozyme to recognize the site without being recruited to it. Accordingly, we designed a system for the tethering of the ribozyme to Cas9 via an MS2 protein/aptamer linkage (FIG. 7A-7D). In this system, an MS2 coat protein is appended to the Cas9 protein, and one or more hairpins recognized by the MS2 coat protein (hereafter these hairpins are called the MS2 aptamer) installed in the variable loop 6 of the ribozyme (FIG. 7A-7D). Upon doing so, significant increase in the number of insertions and deletions (indels) was observed at the targeted site relative to nicking Cas9 alone, indicative of a double-strand break. This suggests that the ribozyme is inserting GTP into the R-loop, generating a break in that strand, but unable to ligate the resulting nick, resulting in a double-strand break and indel formation.

### Example 2. Method for In Vitro Evolution of Ribozymes to Act on DNA

[0482] Previously, Joyce and coworkers (Robertson & Joyce, Nature, 1990; Beaudry & Joyce, Science, 1992; Tsang & Joyce, Biochemistry, 1994; Tsang & Joyce, J. Mol. Biol., 1996; Raillard & Joyce, Biochemistry, 1996) demonstrated a system for the in vitro evolution of group I introns that cleave DNA. In this system (FIG. 8 below), the ribozyme is incubated with a piece of single-stranded DNA. Ribozymes that are able to cleave the DNA (performing the E.S->EP reaction below) then have a constant region of DNA appended to the 3′ end of the molecule. Reverse transcription with a complementary primer and subsequent PCR leads to the amplification of sequences that encode these ribozymes that pass the selection. Transcription of these DNA molecules than results in formation of ribozymes that can reenter the cycle. Repeated cycles result in ribozymes with improved DNA binding ability. However, excessive cycles can result in ribozymes that do not perform nucleotide insertion, as we have observed in ours hands. This is due to the ribozymes becoming optimized at performing a specific chemical reaction which is subtly different from those required for nucleotide insertion. Sequences of group I introns that could theoretically be used as starting points for this evolution can be found here in the database described in Zhou, Y, Lu C, Wu Q J, Wang Y, Sun Z T, Deng J C, Zhang Y. Nucl. Acids. Res. 2008.

### Example 3. Evidence for Ribozyme-Mediated Nucleotide Insertion in Bacteria

[0483] It was hypothesized that, although nucleotide insertion and ligation didn't work in HEK cells, it might work in bacteria. Mg²⁺ is required for both GTP insertion and ligation, but more is required for ligation, and the Mg²⁺ concentration required is higher in bacteria than in mammalian cells. A bacterial-active ribozyme insertase could serve as a starting point for evolution of a ribozyme that can function in mammalian cells.

A series of three plasmids (see FIG. 9) to test if the ribozyme could be active in bacteria. These plasmids would express (i) the ribozyme or (ii) the nicking Cas9 and sgRNA that would target the complex to a site on a third plasmid (iii) which would contain a frame-shifted antibiotic cassette that could be rescued by the insertion of a single nucleotide. Upon expression all components of the system and selecting for bacteria that could grow on the selection antibiotic, roughly 1:10\hat{ }6 of inoculated bacteria could survive, and that these all contained the desired edit at the specified site. Bacteria treated with an inactive ribozyme were unable to survive treatment.

### EQUIVALENTS AND SCOPE

[0484] In the claims articles such as “a,” “an,” and “the” may mean one or more than one unless indicated to the contrary or otherwise evident from the context. Claims or descriptions that include “or” between one or more members of a group are considered satisfied if one, more than one, or all of the group members are present in, employed in, or otherwise relevant to a given product or process unless indicated to the contrary or otherwise evident from the context. The disclosure includes embodiments in which exactly one member of the group is present in, employed in, or otherwise relevant to a given product or process. The disclosure includes embodiments in which more than one, or all of the group members are present in, employed in, or otherwise relevant to a given product or process.

[0485] Furthermore, the disclosure encompasses all variations, combinations, and permutations in which one or more limitations, elements, clauses, and descriptive terms from one or more of the listed claims is introduced into another claim. For example, any claim that is dependent on another claim can be modified to include one or more limitations found in any other claim that is dependent on the same base claim. Where elements are presented as lists, e.g., in Markush group format, each subgroup of the elements is also disclosed, and any element(s) can be removed from the group. It should it be understood that, in general, where the disclosure, or embodiments of the disclosure, is/are referred to as comprising particular elements and/or features, certain embodiments of the disclosure or embodiments of the disclosure consist, or consist essentially of, such elements and/or features. For purposes of simplicity, those embodiments have not been specifically set forth in haec verba herein. It is also noted that the terms “comprising” and “containing” are intended to be open and permits the inclusion of additional elements or steps. Where ranges are given, endpoints are included. Furthermore, unless otherwise indicated or otherwise evident from the context and understanding of one of ordinary skill in the art, values that are expressed as ranges can assume any specific value or sub-range within the stated ranges in different embodiments of the disclosure, to the tenth of the unit of the lower limit of the range, unless the context clearly dictates otherwise.

[0486] This application refers to various issued patents, published patent applications, journal articles, and other publications, all of which are incorporated herein by reference. If there is a conflict between any of the incorporated references and the present disclosure, the specification shall control. In addition, any particular embodiment of the present disclosure that falls within the prior art may be explicitly excluded from any one or more of the claims. Because such embodiments are deemed to be known to one of ordinary skill in the art, they may be excluded even if the exclusion is not set forth explicitly herein. Any particular embodiment of the disclosure can be excluded from any claim, for any reason, whether or not related to the existence of prior art.

[0487] Those skilled in the art will recognize or be able to ascertain using no more than routine experimentation many equivalents to the specific embodiments described herein. The scope of the present embodiments described herein is not intended to be limited to the above Description, but rather is as set forth in the appended claims. Those of ordinary skill in the art will appreciate that various changes and modifications to this description may be made without departing from the spirit or scope of the present disclosure, as defined in the following claims.

What is claimed is:

1. An engineered ribozyme represented by the structure of FIG. 1A.

2. An engineered ribozyme represented by the structure of FIG. 3B.

3. An engineered ribozyme comprising a deletion in the 3′ terminal end sufficient to remove the self-insertion activity of the ribozyme.

4. The engineered ribozyme of claim 3, wherein the deletion in the 3′terminal end comprises a deletion of the terminal 1-5 nucleotides of the ribozyme.

5. The engineered ribozyme of claim 3, further comprising an active site that catalyzes the insertion of a nucleotide into target site of a substrate single strand DNA molecule.

6. The engineered ribozyme of claim 5, wherein the active site comprises a region that hybridizes to the substrate single strand DNA molecule.

7. The engineered ribozyme of claim 6, wherein the region is 5 nucleotides, or 6 nucleotides, or 7 nucleotides, or 8 nucleotides and whose sequence is complementary to the substrate single strand DNA molecule.

8. The engineered ribozyme of claim 5, wherein the active site comprises a nucleotide that forms a wobble base pair with the substrate single strand DNA molecule.

9. The engineered ribozyme of claim 5, wherein the active site comprises an unpaired nucleotide.

10. The engineered ribozyme of claim 5, wherein the active site comprises in a 5′-3′ direction a region that hybridizes to the substrate single strand DNA molecule, a nucleotide that forms a wobble base pair with the substrate single strand DNA molecule, and an unpaired nucleotide.

11. The engineered ribozyme of claim 10, wherein the ribozyme inserts a nucleotide immediate adjacent to the wobble base pair.

12. A ribozyme-mediated programmable nucleic acid editing construct comprising a ribozyme and a nucleic acid programmable DNA binding protein (napDNAbp) which is capable of installing an insertion of one or more nucleotides at a target site in a DNA molecule.

13. The editing construct of claim 12, wherein the ribozyme is capable of inserting one or more nucleotides at the target site.

14. The editing construct of claim 13, wherein the one or more nucleotides is a G or A.

15. The editing construct of claim 13, wherein the one or more nucleotides is a C or T.

16. The editing construct of claim 12, wherein the ribozyme is represented by the structure of FIG. 1A or FIG. 3B.

17. The editing construct of claim 12, wherein the ribozyme is a modified group I intron from Tetrahymena thermophila.

18. The editing construct of claim 12, wherein the ribozyme further comprises a targeting moiety.

19. The editing construct of claim 18, wherein the targeting moiety is an MS2 hairpin structure.

20. The editing construct of claim 12, wherein the ribozyme and the napDNAbp are not fusion proteins.

21. The editing construct of claim 12, wherein the napDNAbp further comprises a targeting moiety receptor capable of binding to a ribozyme comprising a cognate targeting moiety.

22. The editing construct of claim 12, wherein the napDNAbp is a Cas9 protein or functional equivalent thereof.

23. The editing construct of claim 12, wherein the napDNAbp is a nuclease active Cas9, a nuclease inactive Cas9 (dCas9), or a Cas9 nickase (nCas9).

24. The editing construct of claim 12, wherein the napDNAbp is selected from the group consisting of: Cas9, CasX, CasY, Cpf1, C2c1, C2c2, C2C3, and Argonaute and optionally has a nickase activity

25. The editing construct of claim 12, wherein the napDNAbp when complexed with a guide RNA functions to bind to the target site in the DNA molecule and form an R-loop.

26. The editing construct of claim 24, wherein the R-loop comprise a single strand DNA region comprising the target site for binding the ribozyme.

27. A complex comprising the editing construct of any of claims 12-26 and a guide RNA.

28. The complex of claim 27, wherein the guide RNA is fused to the ribozyme.

29. The complex of claim 27, wherein the guide RNA is bound to the napDNAbp.

30. A polynucleotide encoding the ribozyme of any of claims 1-11.

31. A polynucleotide encoding the editing construct of any of claims 12-26.

32. A vector comprising the polynucleotide of claim 30.

33. A vector comprising the polynucleotide of claim 31.

34. A cell comprising an editing construct of any of claims 12-26.

35. A cell comprising a ribozyme of any of claims 1-11.

36. A pharmaceutical composition comprising a ribozyme of any of claims 1-11, an editing construct of any of claims 12-26, or a vector of any of claims 32-33.

37. A method for introducing a new nucleobase pair into a target site of a DNA molecule, comprising contacting a single-stranded R-loop formed in the DNA molecule by a bound napDNAbp with an engineered ribozyme, wherein the engineered ribozyme is configured to insert a nucleobase into an insertion site located in the R-loop.

38. The method of claim 37, wherein DNA repair and/or replication of a cell process the nucleobase insertion to form the new nucleobase pair in the DNA molecule.

39. The method of claim 37, wherein the engineered ribozyme is represented by the structure of FIG. 1A.

40. The method of claim 37, wherein the engineered ribozyme is represented by the structure of FIG. 3B.

41. The method of claim 37, wherein the engineered ribozyme comprises a deletion in the 3′ terminal end sufficient to remove the self-insertion activity of the ribozyme.

42. The method of claim 37, wherein the engineered ribozyme comprises an active site that catalyzes the insertion of the nucleobase.

43. The method of claim 37, wherein the engineered ribozyme comprises an active site having a region that hybridizes to the single-stranded R-loop.

44. The method of claim 37, wherein the engineered ribozyme comprises a nucleotide that forms a wobble base pair with the single-stranded R-loop.

45. The method of claim 37, wherein the engineered ribozyme comprises an unpaired nucleotide.

46. The method of claim 37, wherein the engineered ribozyme comprises an active site comprising in a 5′-3′ direction a region that hybridizes to the single-stranded R-loop, a nucleotide that forms a wobble base pair with the single-stranded R-loop, and an unpaired nucleotide.

47. The method of claim 37, wherein the ribozyme inserts the nucleobase immediate adjacent a wobble base pair formed between the ribozyme and the single-stranded R-loop.

48. The method of claim 37, wherein the ribozyme further comprises a targeting moiety.

49. The method of claim 48, wherein the targeting moiety is an MS2 hairpin structure.

50. The method of claim 37, wherein the ribozyme and the napDNAbp are not fusion proteins.

51. The method of claim 37, wherein the napDNAbp further comprises a targeting moiety receptor capable of binding to a ribozyme comprising a cognate targeting moiety.

52. The method of claim 37, wherein the napDNAbp is a Cas9 protein or functional equivalent thereof.

53. The method of claim 37, wherein the napDNAbp is a nuclease active Cas9, a nuclease inactive Cas9 (dCas9), or a Cas9 nickase (nCas9).

54. The method of claim 37, wherein the napDNAbp is selected from the group consisting of: Cas9, Cas12e, Cas12d, Cas12a, Cas12b1, Cas13a, Cas12c, and Argonaute and optionally has a nickase activity.

55. An engineered ribozyme comprising SEQ ID NO: 88, or a ribozyme comprising a nucleotide sequence that is at least 85%, at least 90%, at least 91%, at least 92%, at least 93%, at least 94%, at least 95%, at least 96%, at least 97%, at least 98%, at least 99%, or at least 99.5% identical to SEQ ID NO: 88.

56. An engineered ribozyme comprising SEQ ID NO: 89, or a ribozyme comprising a nucleotide sequence that is at least 85%, at least 90%, at least 91%, at least 92%, at least 93%, at least 94%, at least 95%, at least 96%, at least 97%, at least 98%, at least 99%, or at least 99.5% identical to SEQ ID NO: 89.

57. An engineered ribozyme comprising SEQ ID NO: 156, or a ribozyme comprising a nucleotide sequence that is at least 85%, at least 90%, at least 91%, at least 92%, at least 93%, at least 94%, at least 95%, at least 96%, at least 97%, at least 98%, at least 99%, or at least 99.5% identical to SEQ ID NO: 156.

58. An engineered ribozyme comprising SEQ ID NO: 157, or a ribozyme comprising a nucleotide sequence that is at least 85%, at least 90%, at least 91%, at least 92%, at least 93%, at least 94%, at least 95%, at least 96%, at least 97%, at least 98%, at least 99%, or at least 99.5% identical to SEQ ID NO: 157.

59. A genome editing system comprising a nucleic acid programmable DNA binding protein (napDNAbp), a guide RNA, and a ribozyme.

60. The genome editing system of claim 59, wherein the ribozyme comprises any of SEQ ID NOs: 88, 89, 156, or 157, or a ribozyme having a sequence that is at least 85%, at least 90%, at least 91%, at least 92%, at least 93%, at least 94%, at least 95%, at least 96%, at least 97%, at least 98%, at least 99%, or at least 99.5% identical to any of SEQ ID NOs: 88, 89, 156, or 157.

61. The genome editing system of claim 59, wherein the ribozyme is capable of inserting one or more nucleotides at the target site.

62. The genome editing system of claim 61, wherein the one or more nucleotides is a G or A.

63. The genome editing system of claim 61, wherein the one or more nucleotides is a C or T.

64. The genome editing system of claim 59, wherein the napDNAbp is a Cas9 protein or functional equivalent thereof.

65. The genome editing system of claim 59, wherein the napDNAbp is a nuclease active Cas9, a nuclease inactive Cas9 (dCas9), or a Cas9 nickase (nCas9).

66. The genome editing system of claim 59, wherein the napDNAbp is selected from the group consisting of: Cas9, Cas12e, Cas12d, Cas12a, Cas12b1, Cas13a, Cas12c, and Argonaute and optionally has a nickase activity.

67. The genome editing system of claim 59, wherein the napDNAbp comprises a recruitment domain.

68. The genome editing system of claim 67, wherein the recruitment domain is a MS2 bacteriophage coat protein.

69. The genome editing system of claim 67, wherein the MS2 bacteriophage coat protein comprises SEQ ID NO: 94, or an amino acid sequence having at least 85%, at least 90%, at least 91%, at least 92%, at least 93%, at least 94%, at least 95%, at least 96%, at least 97%, at least 98%, at least 99%, or at least 99.5% sequence identity with SEQ ID NO: 94.

70. The genome editing system of claim 67, wherein the ribozyme comprises the SEQ ID NO: 89, or a ribozyme having a sequence that is at least 85%, at least 90%, at least 91%, at least 92%, at least 93%, at least 94%, at least 95%, at least 96%, at least 97%, at least 98%, at least 99%, or at least 99.5% identical to any of SEQ ID NOs: 89.

71. The genome editing system of claim 67, wherein the ribozyme comprises the SEQ ID NO: 157, or a ribozyme having a sequence that is at least 85%, at least 90%, at least 91%, at least 92%, at least 93%, at least 94%, at least 95%, at least 96%, at least 97%, at least 98%, at least 99%, or at least 99.5% identical to any of SEQ ID NOs: 157.

72. The genome editing system of claim 59, wherein the napDNAbp comprise an additional one or more functional domains.

73. The genome editing system of claim 72, wherein the one or more functional domains is an NLS.

74. The genome editing system of claim 72, wherein the one or more functional domains is an intein or a split-intein.

75. The genome editing system of claim 72, wherein the one or more functional domains are coupled via one or more linkers.

76. The genome editing system of claim 73, wherein the NLS comprises SEQ ID NOs: 9, 118, 10, 119, or 121-126, or an amino acid sequence having at least 85%, at least 90%, at least 91%, at least 92%, at least 93%, at least 94%, at least 95%, at least 96%, at least 97%, at least 98%, at least 99%, or at least 99.5% sequence identity to any of SEQ ID NOs: 9, 118, 10, 119, or 121-126.

77. The genome editing system of claim 74, wherein the intein or split-intein comprises SEQ ID NOs: 1-8, or an amino acid sequence having at least 85%, at least 90%, at least 91%, at least 92%, at least 93%, at least 94%, at least 95%, at least 96%, at least 97%, at least 98%, at least 99%, or at least 99.5% sequence identity to any of SEQ ID NOs: 1-8.

78. The genome editing system of claim 75, wherein the linker comprises SEQ ID NOs: 102-113, or an amino acid sequence having at least 85%, at least 90%, at least 91%, at least 92%, at least 93%, at least 94%, at least 95%, at least 96%, at least 97%, at least 98%, at least 99%, or at least 99.5% sequence identity to any of SEQ ID NOs: 102-113.

79. The genome editing system of claim 59, wherein the napDNAbp when complexed with the guide RNA functions to bind to a target site in a DNA molecule, forming an R-loop.

80. The genome editing system of claim 79, wherein the R-loop comprises a single strand DNA region comprising a complementary region that binds to the ribozyme.

81. The genome editing system of claim 80, wherein the complementary region binds to the P0 site of the ribozyme.

82. One or more polynucleotides encoding the genome editing system of any of claims 59-81.

83. A vector comprising the polynucleotide of claim 82.

84. The vector of claim 83, wherein the vector an rAAV.

85. The vector of claim 84, wherein the rAAV is an rAAV2, rAAV6, rAAV8, rPHP.B, rPHP.eB, or rAAV9.

86. A cell comprising the vector of any of claims 83-85.

87. A pharmaceutical composition comprising a genome editing system of any of claims 59-81, a polynucleotide of claim 82, or a vector of claims 83-85, and a pharmaceutically acceptable excipient.

88. A method for installing one or more nucleobases at a target site in a DNA sequence, comprising contacting the DNA sequence with a genome editing system of any of claims 59-80.

89. The method of claim 88, wherein the genome editing system comprises a nucleic acid programmable DNA binding protein (napDNAbp), a guide RNA, and a ribozyme.

90. The method of claim 89, wherein the ribozyme comprises any of SEQ ID NOs: 88, 89, 156, or 157, or a ribozyme having a sequence that is at least 85%, at least 90%, at least 91%, at least 92%, at least 93%, at least 94%, at least 95%, at least 96%, at least 97%, at least 98%, at least 99%, or at least 99.5% identical to any of SEQ ID NOs: 88, 89, 156, or 157.

91. The method of claim 89, wherein the ribozyme is capable of inserting one or more nucleotides at the target site.

92. The method of claim 88, wherein the method installs a G, A, T, or C, or a combination thereof.

93. The method of claim 88, wherein the method installs a frameshift mutation.

94. The method of claim 89, wherein the napDNAbp is a Cas9 protein or functional equivalent thereof.

95. The method of claim 89, wherein the napDNAbp is a nuclease active Cas9, a nuclease inactive Cas9 (dCas9), or a Cas9 nickase (nCas9).

96. The method of claim 89, wherein the napDNAbp is selected from the group consisting of: Cas9, Cas12e, Cas12d, Cas12a, Cas12b1, Cas13a, Cas12c, and Argonaute and optionally has a nickase activity.

97. The method of claim 89, wherein the napDNAbp comprises a recruitment domain.

98. The method of claim 89, wherein the recruitment domain is a MS2 bacteriophage coat protein.

99. The method of claim 98, wherein the MS2 bacteriophage coat protein comprises SEQ ID NO: 94, or an amino acid sequence having at least 85%, at least 90%, at least 91%, at least 92%, at least 93%, at least 94%, at least 95%, at least 96%, at least 97%, at least 98%, at least 99%, or at least 99.5% sequence identity with SEQ ID NO: 94.

100. The method of claim 98, wherein the ribozyme comprises the SEQ ID NO: 89, or a ribozyme having a sequence that is at least 85%, at least 90%, at least 91%, at least 92%, at least 93%, at least 94%, at least 95%, at least 96%, at least 97%, at least 98%, at least 99%, or at least 99.5% identical to any of SEQ ID NOs: 89.

101. The method of claim 98, wherein the ribozyme comprises the SEQ ID NO: 157, or a ribozyme having a sequence that is at least 85%, at least 90%, at least 91%, at least 92%, at least 93%, at least 94%, at least 95%, at least 96%, at least 97%, at least 98%, at least 99%, or at least 99.5% identical to any of SEQ ID NOs: 157.

102. An engineered ribozyme that catalyzes the insertion of a nucleotide into a single-stranded DNA molecule.

103. The engineered ribozyme of claim 102, wherein the nucleotide is G.

104. The engineered ribozyme of claim 102, wherein the nucleotide is A.

105. The engineered ribozyme of claim 102, wherein the nucleotide is T.

106. The engineered ribozyme of claim 102, wherein the nucleotide is C.

The application's sequence listing, which the Patent Office published only in electronic form, follows.

SEQUENCE LISTING (155 sequences)

SEQ ID NO: 1 - protein, 413 aa, Artificial Sequence
  Synthetic
CLAEGTRIFDPVTGTTHRIEDVVDGRKPIHVVAAAKDGTLLARPVVSWFDQGTRDVIGLRIAGGAIVWATPDHKVLTEYGWRAAGELRKGDRVAGPGGSGNSLALSLTADQMVSALLDAEPPILYSEYDPTSPFSEASMMGLLTNLADRELVHMINWAKRVPGFVDLTLHDQAHLLECAWLEILMIGLVWRSMEHPGKLLFAPNLLLDRNQGKCVEGMVEIFDMLLATSSRFRMMNLQGEEFVCLKSIILLNSGVYTFLSSTLKSLEEKDHIHRALDKITDTLIHLMAKAGLTLQQQHQRLAQLLLILSHIRHMSNKGMEHLYSMKYKNVVPLYDLLLEMLDAHRLHAGGSGASRVQAFADALDDKFLHDMLAEELRYSVIREVLPTRRARTFDLEVEELHTLVAEGVVVHNC

SEQ ID NO: 2 - protein, 413 aa, Artificial Sequence
  Synthetic
CLAEGTRIFDPVTGTTHRIEDVVDGRKPIHVVAVAKDGTLLARPVVSWFDQGTRDVIGLRIAGGAIVWATPDHKVLTEYGWRAAGELRKGDRVAGPGGSGNSLALSLTADQMVSALLDAEPPILYSEYDPTSPFSEASMMGLLTNLADRELVHMINWAKRVPGFVDLTLHDQAHLLECAWLEILMIGLVWRSMEHPGKLLFAPNLLLDRNQGKCVEGMVEIFDMLLATSSRFRMMNLQGEEFVCLKSIILLNSGVYTFLSSTLKSLEEKDHIHRALDKITDTLIHLMAKAGLTLQQQHQRLAQLLLILSHIRHMSNKGMEHLYSMKYTNVVPLYDLLLEMLDAHRLHAGGSGASRVQAFADALDDKFLHDMLAEELRYSVIREVLPTRRARTFDLEVEELHTLVAEGVVVHNC

SEQ ID NO: 3 - protein, 413 aa, Artificial Sequence
  Synthetic
CLAEGTRIFDPVTGTTHRIEDVVDGRKPIHVVAAAKDGTLLARPVVSWFDQGTRDVIGLRIAGGATVWATPDHKVLTEYGWRAAGELRKGDRVAGPGGSGNSLALSLTADQMVSALLDAEPPIPYSEYDPTSPFSEASMMGLLTNLADRELVHMINWAKRVPGFVDLTLHDQAHLLECAWLEILMIGLVWRSMEHPGKLLFAPNLLLDRNQGKCVEGMVEIFDMLLATSSRFRMMNLQGEEFVCLKSIILLNSGVYTFLSSTLKSLEEKDHIHRALDKITDTLIHLMAKAGLTLQQQHQRLAQLLLILSHIRHMSNKGMEHLYSMKYKNVVPLYDLLLEMLDAHRLHAGGSGASRVQAFADALDDKFLHDMLAEGLRYSVIREVLPTRRARTFDLEVEELHTLVAEGVVVHNC

SEQ ID NO: 4 - protein, 413 aa, Artificial Sequence
  Synthetic
CLAEGTRIFDPVTGTTHRIEDVVDGRKPIHVVAAAKDGTLLARPVVSWFDQGTRDVIGLRIAGGATVWATPDHKVLTEYGWRAAGELRKGDRVAGPGGSGNSLALSLTADQMVSALLDAEPPILYSEYDPTSPFSEASMMGLLTNLADRELVHMINWAKRVPGFVDLTLHDQAHLLECAWLEILMIGLVWRSMEHPGKLLFAPNLLLDRNQGKCVEGMVEIFDMLLATSSRFRMMNLQGEEFVCLKSIILLNSGVYTFLSSTLKSLEEKDHIHRALDKITDTLIHLMAKAGLTLQQQHQRLAQLLLILSHIRHMSNKGMEHLYSMKYKNVVPLYDLLLEMLDAHRLHAGGSGASRVQAFADALDDKFLHDMLAEELRYSVIREVLPTRRARTFDLEVEELHTLVAEGVVVHNC

SEQ ID NO: 5 - protein, 413 aa, Artificial Sequence
  Synthetic
CLAEGTRIFDPVTGTTHRIEDVVDGRKPIHVVAAAKDGTLLARPVVSWFDQGTRDVIGLRIAGGATVWATPDHKVLTEYGWRAAGELRKGDRVAGPGGSGNSLALSLTADQMVSALLDAEPPIPYSEYDPTSPFSEASMMGLLTNLADRELVHMINWAKRVPGFVDLTLHDQAHLLECAWLEILMIGLVWRSMEHPGKLLFAPNLLLDRNQGKCVEGMVEIFDMLLATSSRFRMMNLQGEEFVCLKSIILLNSGVYTFLSSTLKSLEEKDHIHRALDKITDTLIHLMAKAGLTLQQQHQRLAQLLLILSHIRHMSNKGMEHLYSMKYKNVVPLYDLLLEMLDAHRLHAGGSGASRVQAFADALDDKFLHDMLAEELRYSVIREVLPTRRARTFDLEVEELHTLVAEGVVVHNC

SEQ ID NO: 6 - protein, 413 aa, Artificial Sequence
  Synthetic
CLAEGTRIFDPVTGTTHRIEDVVDGRKPIHVVAAAKDGTLLARPVVSWFDQGTRDVIGLRIAGGATVWATPDHKVLTEYGWRAAGELRKGDRVAGPGGSGNSLALSLTADQMVSALLDAEPPILYSEYNPTSPFSEASMMGLLTNLADRELVHMINWAKRVPGFVDLTLHDQAHLLERAWLEILMIGLVWRSMEHPGKLLFAPNLLLDRNQGKCVEGMVEIFDMLLATSSRFRMMNLQGEEFVCLKSIILLNSGVYTFLSSTLKSLEEKDHIHRALDKITDTLIHLMAKAGLTLQQQHQRLAQLLLILSHIRHMSNKGMEHLYSMKYKNVVPLYDLLLEMLDAHRLHAGGSGASRVQAFADALDDKFLHDMLAEGLRYSVIREVLPTRRARTFDLEVEELHTLVAEGVVVHNC

SEQ ID NO: 7 - protein, 413 aa, Artificial Sequence
  Synthetic
CLAEGTRIFDPVTGTTHRIEDVVDGRKPIHVVAAAKDGTLLARPVVSWFDQGTRDVIGLRIAGGAIVWATPDHKVLTEYGWRAAGELRKGDRVAGPGGSGNSLALSLTADQMVSALLDAEPPILYSEYDPTSPFSEASMMGLLTNLADRELVHMINWAKRVPGFVDLTLHDQAHLLERAWLEILMIGLVWRSMEHPGKLLFAPNLLLDRNQGKCVEGMVEIFDMLLATSSRFRMMNLQGEEFVCLKSIILLNSGVYTFLSSTLKSLEEKDHIHRALDKITDTLIHLMAKAGLTLQQQHQRLAQLLLILSHIRHMSNKGMEHLYSMKYKNVVPLYDLLLEMLDAHRLHAGGSGASRVQAFADALDDKFLHDMLAEGLRYSVIREVLPTRRARTFDLEVEELHTLVAEGVVVHNC

SEQ ID NO: 8 - protein, 413 aa, Artificial Sequence
  Synthetic
CLAEGTRIFDPVTGTTHRIEDVVDGRKPIHVVAVAKDGTLLARPVVSWFDQGTRDVIGLRIAGGATVWATPDHKVLTEYGWRAAGELRKGDRVAGPGGSGNSLALSLTADQMVSALLDAEPPILYSEYDPTSPFSEASMMGLLTNLADRELVHMINWAKRVPGFVDLTLHDQAHLLERAWLEILMIGLVWRSMEHPGKLLFAPNLLLDRNQGKCVEGMVEIFDMLLATSSRFRMMNLQGEEFVCLKSIILLNSGVYTFLSSTLKSLEEKDHIHRALDKITDTLIHLMAKAGLTLQQQHQRLAQLLLILSHIRHMSNKGMEHLYSMKYKNVVPLYDLLLEMLDAHRLHAGGSGASRVQAFADALDDKFLHDMLAEELRYSVIREVLPTRRARTFDLEVEELHTLVAEGVVVHNC

SEQ ID NO: 9 - protein, 7 aa, Artificial Sequence
  Synthetic
PKKKRKV

SEQ ID NO: 10 - protein, 30 aa, Artificial Sequence
  Synthetic
MDSLLMNRRKFLYQFKNVRWAKGRRETYLC

SEQ ID NO: 11 - protein, 1368 aa, Streptococcus pyogenes [sequence omitted]

SEQ ID NO: 12 - DNA, 4104 bp, Streptococcus pyogenes
atggataaaaaatatagcattggcctggatattggcaccaacagcgtgggctgggcggtgattaccgatgaatataaagtgccgagcaaaaaatttaaagtgctgggcaacaccgatcgccatagcattaaaaaaaacctgattggcgcgctgctgtttgatagcggcgaaaccgcggaagcgacccgcctgaaacgcaccgcgcgccgccgctatacccgccgcaaaaaccgcatttgctatctgcaggaaatttttagcaacgaaatggcgaaagtggatgatagcttttttcatcgcctggaagaaagctttctggtggaagaagataaaaaacatgaacgccatccgatttttggcaacattgtggatgaagtggcgtatcatgaaaaatatccgaccatttatcatctgcgcaaaaaactggtggatagcaccgataaagcggatctgcgcctgatttatctggcgctggcgcatatgattaaatttcgcggccattttctgattgaaggcgatctgaacccggataacagcgatgtggataaactgtttattcagctggtgcagacctataaccagctgtttgaagaaaacccgattaacgcgagcggcgtggatgcgaaagcgattctgagcgcgcgcctgagcaaaagccgccgcctggaaaacctgattgcgcagctgccgggcgaaaaaaaaaacggcctgtttggcaacctgattgcgctgagcctgggcctgaccccgaactttaaaagcaactttgatctggcggaagatgcgaaactgcagctgagcaaagatacctatgatgatgatctggataacctgctggcgcagattggcgatcagtatgcggatctgtttctggcggcgaaaaacctgagcgatgcgattctgctgagcgatattctgcgcgtgaacaccgaaattaccaaagcgccgctgagcgcgagcatgattaaacgctatgatgaacatcatcaggatctgaccctgctgaaagcgctggtgcgccagcagctgccggaaaaatataaagaaattttttttgatcagagcaaaaacggctatgcgggctatattgatggcggcgcgagccaggaagaattttataaatttattaaaccgattctggaaaaaatggatggcaccgaagaactgctggtgaaactgaaccgcgaagatctgctgcgcaaacagcgcacctttgataacggcagcattccgcatcagattcatctgggcgaactgcatgcgattctgcgccgccaggaagatttttatccgtttctgaaagataaccgcgaaaaaattgaaaaaattctgacctttcgcattccgtattatgtgggcccgctggcgcgcggcaacagccgctttgcgtggatgacccgcaaaagcgaagaaaccattaccccgtggaactttgaagaagtggtggataaaggcgcgagcgcgcagagctttattgaacgcatgaccaactttgataaaaacctgccgaacgaaaaagtgctgccgaaacatagcctgctgtatgaatattttaccgtgtataacgaactgaccaaagtgaaatatgtgaccgaaggcatgcgcaaaccggcgtttctgagcggcgaacagaaaaaagcgattgtggatctgctgtttaaaaccaaccgcaaagtgaccgtgaaacagctgaaagaagattattttaaaaaaattgaatgctttgatagcgtggaaattagcggcgtggaagatcgctttaacgcgagcctgggcacctatcatgatctgctgaaaattattaaagataaagattttctggataacgaagaaaacgaagatattctggaagatattgtgctgaccctgaccctgtttgaagatcgcgaaatgattgaagaacgcctgaaaacctatgcgcatctgtttgatgataaagtgatgaaacagctgaaacgccgccgctataccggctggggccgcctgagccgcaaactgattaacggcattcgcgataaacagagcggcaaaaccattctggattttctgaaaagcgatggctttgcgaaccgcaactttatgcagctgattcatgatgatagcctgacctttaaagaagatattcagaaagcgcaggtgagcggccagggcgatagcctgcatgaacatattgcgaacctggcgggcagcccggcgattaaaaaaggcattctgcagaccgtgaaagtggtggatgaactggtgaaagtgatgggccgccataaaccggaaaacattgtgattgaaatggcgcgcgaaaaccagaccacccagaaaggccagaaaaacagccgcgaacgcatgaaacgcattgaagaaggcattaaagaactgggcagccagattctgaaagaacatccggtggaaaacacccagctgcagaacgaaaaactgtatctgtattatctgcagaacggccgcgatatgtatgtggatcaggaactggatattaaccgcctgagcgattatgatgtggatcatattgtgccgcagagctttctgaaagatgatagcattgataacaaagtgctgacccgcagcgataaaaaccgcggcaaaagcgataacgtgccgagcgaagaagtggtgaaaaaaatgaaaaactattggcgccagctgctgaacgcgaaactgattacccagcgcaaatttgataacctgaccaaagcggaacgcggcggcctgagcgaactggataaagcgggctttattaaacgccagctggtggaaacccgccagattaccaaacatgtggcgcagattctggatagccgcatgaacaccaaatatgatgaaaacgataaactgattcgcgaagtgaaagtgattaccctgaaaagcaaactggtgagcgattttcgcaaagattttcagttttataaagtgcgcgaaattaacaactatcatcatgcgcatgatgcgtatctgaacgcggtggtgggcaccgcgctgattaaaaaatatccgaaactggaaagcgaatttgtgtatggcgattataaagtgtatgatgtgcgcaaaatgattgcgaaaagcgaacaggaaattggcaaagcgaccgcgaaatattttttttatagcaacattatgaacttttttaaaaccgaaattaccctggcgaacggcgaaattcgcaaacgcccgctgattgaaaccaacggcgaaaccggcgaaattgtgtgggataaaggccgcgattttgcgaccgtgcgcaaagtgctgagcatgccgcaggtgaacattgtgaaaaaaaccgaagtgcagaccggcggctttagcaaagaaagcattctgccgaaacgcaacagcgataaactgattgcgcgcaaaaaagattgggatccgaaaaaatatggcggctttgatagcccgaccgtggcgtatagcgtgctggtggtggcgaaagtggaaaaaggcaaaagcaaaaaactgaaaagcgtgaaagaactgctgggcattaccattatggaacgcagcagctttgaaaaaaacccgattgattttctggaagcgaaaggctataaagaagtgaaaaaagatctgattattaaactgccgaaatatagcctgtttgaactggaaaacggccgcaaacgcatgctggcgagcgcgggcgaactgcagaaaggcaacgaactggcgctgccgagcaaatatgtgaactttctgtatctggcgagccattatgaaaaactgaaaggcagcccggaagataacgaacagaaacagctgtttgtggaacagcataaacattatctggatgaaattattgaacagattagcgaatttagcaaacgcgtgattctggcggatgcgaacctggataaagtgctgagcgcgtataacaaacatcgcgataaaccgattcgcgaacaggcggaaaacattattcatctgtttaccctgaccaacctgggcgcgccggcggcgtttaaatattttgataccaccattgatcgcaaacgctataccagcaccaaagaagtgctggatgcgaccctgattcatcagagcattaccggcctgtatgaaacccgcattgatctgagccagctgggcggcgat

SEQ ID NO: 13 - DNA, 4104 bp, Streptococcus pyogenes
atggataagaaatactcaataggcttagatatcggcacaaatagcgtcggatgggcggtgatcactgatgattataaggttccgtctaaaaagttcaaggttctgggaaatacagaccgccacagtatcaaaaaaaatcttataggggctcttttatttggcagtggagagacagcggaagcgactcgtctcaaacggacagctcgtagaaggtatacacgtcggaagaatcgtatttgttatctacaggagattttttcaaatgagatggcgaaagtagatgatagtttctttcatcgacttgaagagtcttttttggtggaagaagacaagaagcatgaacgtcatcctatttttggaaatatagtagatgaagttgcttatcatgagaaatatccaactatctatcatctgcgaaaaaaattggcagattctactgataaagcggatttgcgcttaatctatttggccttagcgcatatgattaagtttcgtggtcattttttgattgagggagatttaaatcctgataatagtgatgtggacaaactatttatccagttggtacaaatctacaatcaattatttgaagaaaaccctattaacgcaagtagagtagatgctaaagcgattctttctgcacgattgagtaaatcaagacgattagaaaatctcattgctcagctccccggtgagaagagaaatggcttgtttgggaatctcattgctttgtcattgggattgacccctaattttaaatcaaattttgatttggcagaagatgctaaattacagctttcaaaagatacttacgatgatgatttagataatttattggcgcaaattggagatcaatatgctgatttgtttttggcagctaagaatttatcagatgctattttactttcagatatcctaagagtaaatagtgaaataactaaggctcccctatcagcttcaatgattaagcgctacgatgaacatcatcaagacttgactcttttaaaagctttagttcgacaacaacttccagaaaagtataaagaaatcttttttgatcaatcaaaaaacggatatgcaggttatattgatgggggagctagccaagaagaattttataaatttatcaaaccaattttagaaaaaatggatggtactgaggaattattggtgaaactaaatcgtgaagatttgctgcgcaagcaacggacctttgacaacggctctattccccatcaaattcacttgggtgagctgcatgctattttgagaagacaagaagacttttatccatttttaaaagacaatcgtgagaagattgaaaaaatcttgacttttcgaattccttattatgttggtccattggcgcgtggcaatagtcgttttgcatggatgactcggaagtctgaagaaacaattaccccatggaattttgaagaagttgtcgataaaggtgcttcagctcaatcatttattgaacgcatgacaaactttgataaaaatcttccaaatgaaaaagtactaccaaaacatagtttgctttatgagtattttacggtttataacgaattgacaaaggtcaaatatgttactgagggaatgcgaaaaccagcatttctttcaggtgaacagaagaaagccattgttgatttactcttcaaaacaaatcgaaaagtaaccgttaagcaattaaaagaagattatttcaaaaaaatagaatgttttgatagtgttgaaatttcaggagttgaagatagatttaatgcttcattaggcgcctaccatgatttgctaaaaattattaaagataaagattttttggataatgaagaaaatgaagatatcttagaggatattgttttaacattgaccttatttgaagatagggggatgattgaggaaagacttaaaacatatgctcacctctttgatgataaggtgatgaaacagcttaaacgtcgccgttatactggttggggacgtttgtctcgaaaattgattaatggtattagggataagcaatctggcaaaacaatattagattttttgaaatcagatggttttgccaatcgcaattttatgcagctgatccatgatgatagtttgacatttaaagaagatattcaaaaagcacaggtgtctggacaaggccatagtttacatgaacagattgctaacttagctggcagtcctgctattaaaaaaggtattttacagactgtaaaaattgttgatgaactggtcaaagtaatggggcataagccagaaaatatcgttattgaaatggcacgtgaaaatcagacaactcaaaagggccagaaaaattcgcgagagcgtatgaaacgaatcgaagaaggtatcaaagaattaggaagtcagattcttaaagagcatcctgttgaaaatactcaattgcaaaatgaaaagctctatctctattatctacaaaatggaagagacatgtatgtggaccaagaattagatattaatcgtttaagtgattatgatgtcgatcacattgttccacaaagtttcattaaagacgattcaatagacaataaggtactaacgcgttctgataaaaatcgtggtaaatcggataacgttccaagtgaagaagtagtcaaaaagatgaaaaactattggagacaacttctaaacgccaagttaatcactcaacgtaagtttgataatttaacgaaagctgaacgtggaggtttgagtgaacttgataaagctggttttatcaaacgccaattggttgaaactcgccaaatcactaagcatgtggcacaaattttggatagtcgcatgaatactaaatacgatgaaaatgataaacttattcgagaggttaaagtgattaccttaaaatctaaattagtttctgacttccgaaaagatttccaattctataaagtacgtgagattaacaattaccatcatgcccatgatgcgtatctaaatgccgtcgttggaactgctttgattaagaaatatccaaaacttgaatcggagtttgtctatggtgattataaagtttatgatgttcgtaaaatgattgctaagtctgagcaagaaataggcaaagcaaccgcaaaatatttcttttactctaatatcatgaacttcttcaaaacagaaattacacttgcaaatggagagattcgcaaacgccctctaatcgaaactaatggggaaactggagaaattgtctgggataaagggcgagattttgccacagtgcgcaaagtattgtccatgccccaagtcaatattgtcaagaaaacagaagtacagacaggcggattctccaaggagtcaattttaccaaaaagaaattcggacaagcttattgctcgtaaaaaagactgggatccaaaaaaatatggtggttttgatagtccaacggtagcttattcagtcctagtggttgctaaggtggaaaaagggaaatcgaagaagttaaaatccgttaaagagttactagggatcacaattatggaaagaagttcctttgaaaaaaatccgattgactttttagaagctaaaggatataaggaagttaaaaaagacttaatcattaaactacctaaatatagtctttttgagttagaaaacggtcgtaaacggatgctggctagtgccggagaattacaaaaaggaaatgagctggctctgccaagcaaatatgtgaattttttatatttagctagtcattatgaaaagttgaagggtagtccagaagataacgaacaaaaacaattgtttgtggagcagcataagcattatttagatgagattattgagcaaatcagtgaattttctaagcgtgttattttagcagatgccaatttagataaagttcttagtgcatataacaaacatagagacaaaccaatacgtgaacaagcagaaaatattattcatttatttacgttgacgaatcttggagctcccgctgcttttaaatattttgatacaacaattgatcgtaaacgatatacgtctacaaaagaagttttagatgccactcttatccatcaatccatcactggtctttatgaaacacgcattgatttgagtcagctaggaggtgactga

SEQ ID NO: 14 - protein, 1367 aa, Streptococcus pyogenes
MDKKYSIGLDIGTNSVGWAVITDDYKVPSKKFKVLGNTDRHSIKKNLIGALLFGSGETAEATRLKRTARRRYTRRKNRICYLQEIFSNEMAKVDDSFFHRLEESFLVEEDKKHERHPIFGNIVDEVAYHEKYPTIYHLRKKLADSTDKADLRLIYLALAHMIKFRGHFLIEGDLNPDNSDVDKLFIQLVQIYNQLFEENPINASRVDAKAILSARLSKSRRLENLIAQLPGEKRNGLFGNLIALSLGLTPNFKSNFDLAEDAKLQLSKDTYDDDLDNLLAQIGDQYADLFLAAKNLSDAILLSDILRVNSEITKAPLSASMIKRYDEHHQDLTLLKALVRQQLPEKYKEIFFDQSKNGYAGYIDGGASQEEFYKFIKPILEKMDGTEELLVKLNREDLLRKQRTFDNGSIPHQIHLGELHAILRRQEDFYPFLKDNREKIEKILTFRIPYYVGPLARGNSRFAWMTRKSEETITPWNFEEVVDKGASAQSFIERMTNFDKNLPNEKVLPKHSLLYEYFTVYNELTKVKYVTEGMRKPAFLSGEQKKAIVDLLFKTNRKVTVKQLKEDYFKKIECFDSVEISGVEDRFNASLGAYHDLLKIIKDKDFLDNEENEDILEDIVLTLTLFEDRGMIEERLKTYAHLFDDKVMKQLKRRRYTGWGRLSRKLINGIRDKQSGKTILDFLKSDGFANRNFMQLIHDDSLTFKEDIQKAQVSGQGHSLHEQIANLAGSPAIKKGILQTVKIVDELVKVMGHKPENIVIEMARENQTTQKGQKNSRERMKRIEEGIKELGSQILKEHPVENTQLQNEKLYLYYLQNGRDMYVDQELDINRLSDYDVDHIVPQSFIKDDSIDNKVLTRSDKNRGKSDNVPSEEVVKKMKNYWRQLLNAKLITQRKFDNLTKAERGGLSELDKAGFIKRQLVETRQITKHVAQILDSRMNTKYDENDKLIREVKVITLKSKLVSDFRKDFQFYKVREINNYHHAHDAYLNAVVGTALIKKYPKLESEFVYGDYKVYDVRKMIAKSEQEIGKATAKYFFYSNIMNFFKTEITLANGEIRKRPLIETNGETGEIVWDKGRDFATVRKVLSMPQVNIVKKTEVQTGGFSKESILPKRNSDKLIARKKDWDPKKYGGFDSPTVAYSVLVVAKVEKGKSKKLKSVKELLGITIMERSSFEKNPIDFLEAKGYKEVKKDLIIKLPKYSLFELENGRKRMLASAGELQKGNELALPSKYVNFLYLASHYEKLKGSPEDNEQKQLFVEQHKHYLDEIIEQISEFSKRVILADANLDKVLSAYNKHRDKPIREQAENIIHLFTLTNLGAPAAFKYFDTTIDRKRYTSTKEVLDATLIHQSITGLYETRIDLSQLGGD

SEQ ID NO: 15 - DNA, 4212 bp, Streptococcus pyogenes
atggataaaaagtattctattggtttagacatcggcactaattccgttggatgggctgtcataaccgatgaatacaaagtaccttcaaagaaatttaaggtgttggggaacacagaccgtcattcgattaaaaagaatcttatcggtgccctcctattcgatagtggcgaaacggcagaggcgactcgcctgaaacgaaccgctcggagaaggtatacacgtcgcaagaaccgaatatgttacttacaagaaatttttagcaatgagatggccaaagttgacgattctttctttcaccgtttggaagagtccttccttgtcgaagaggacaagaaacatgaacggcaccccatctttggaaacatagtagatgaggtggcatatcatgaaaagtacccaacgatttatcacctcagaaaaaagctagttgactcaactgataaagcggacctgaggttaatctacttggctcttgcccatatgataaagttccgtgggcactttctcattgagggtgatctaaatccggacaactcggatgtcgacaaactgttcatccagttagtacaaacctataatcagttgtttgaagagaaccctataaatgcaagtggcgtggatgcgaaggctattcttagcgcccgcctctctaaatcccgacggctagaaaacctgatcgcacaattacccggagagaagaaaaatgggttgttcggtaaccttatagcgctctcactaggcctgacaccaaattttaagtcgaacttcgacttagctgaagatgccaaattgcagcttagtaaggacacgtacgatgacgatctcgacaatctactggcacaaattggagatcagtatgcggacttatttttggctgccaaaaaccttagcgatgcaatcctcctatctgacatactgagagttaatactgagattaccaaggcgccgttatccgcttcaatgatcaaaaggtacgatgaacatcaccaagacttgacacttctcaaggccctagtccgtcagcaactgcctgagaaatataaggaaatattctttgatcagtcgaaaaacgggtacgcaggttatattgacggcggagcgagtcaagaggaattctacaagtttatcaaacccatattagagaagatggatgggacggaagagttgcttgtaaaactcaatcgcgaagatctactgcgaaagcagcggactttcgacaacggtagcattccacatcaaatccacttaggcgaattgcatgctatacttagaaggcaggaggatttttatccgttcctcaaagacaatcgtgaaaagattgagaaaatcctaacctttcgcataccttactatgtgggacccctggcccgagggaactctcggttcgcatggatgacaagaaagtccgaagaaacgattactccatggaattttgaggaagttgtcgataaaggtgcgtcagctcaatcgttcatcgagaggatgaccaactttgacaagaatttaccgaacgaaaaagtattgcctaagcacagtttactttacgagtatttcacagtgtacaatgaactcacgaaagttaagtatgtcactgagggcatgcgtaaacccgcctttctaagcggagaacagaagaaagcaatagtagatctgttattcaagaccaaccgcaaagtgacagttaagcaattgaaagaggactactttaagaaaattgaatgcttcgattctgtcgagatctccggggtagaagatcgatttaatgcgtcacttggtacgtatcatgacctcctaaagataattaaagataaggacttcctggataacgaagagaatgaagatatcttagaagatatagtgttgactcttaccctctttgaagatcgggaaatgattgaggaaagactaaaaacatacgctcacctgttcgacgataaggttatgaaacagttaaagaggcgtcgctatacgggctggggacgattgtcgcggaaacttatcaacgggataagagacaagcaaagtggtaaaactattctcgattttctaaagagcgacggcttcgccaataggaactttatgcagctgatccatgatgactctttaaccttcaaagaggatatacaaaaggcacaggtttccggacaaggggactcattgcacgaacatattgcgaatcttgctggttcgccagccatcaaaaagggcatactccagacagtcaaagtagtggatgagctagttaaggtcatgggacgtcacaaaccggaaaacattgtaatcgagatggcacgcgaaaatcaaacgactcagaaggggcaaaaaaacagtcgagagcggatgaagagaatagaagagggtattaaagaactgggcagccagatcttaaaggagcatcctgtggaaaatacccaattgcagaacgagaaactttacctctattacctacaaaatggaagggacatgtatgttgatcaggaactggacataaaccgtttatctgattacgacgtcgatcacattgtaccccaatcctttttgaaggacgattcaatcgacaataaagtgcttacacgctcggataagaaccgagggaaaagtgacaatgttccaagcgaggaagtcgtaaagaaaatgaagaactattggcggcagctcctaaatgcgaaactgataacgcaaagaaagttcgataacttaactaaagctgagaggggtggcttgtctgaacttgacaaggccggatttattaaacgtcagctcgtggaaacccgccaaatcacaaagcatgttgcacagatactagattcccgaatgaatacgaaatacgacgagaacgataagctgattcgggaagtcaaagtaatcactttaaagtcaaaattggtgtcggacttcagaaaggattttcaattctataaagttagggagataaataactaccaccatgcgcacgacgcttatcttaatgccgtcgtagggaccgcactcattaagaaatacccgaagctagaaagtgagtttgtgtatggtgattacaaagtttatgacgtccgtaagatgatcgcgaaaagcgaacaggagataggcaaggctacagccaaatacttcttttattctaacattatgaatttctttaagacggaaatcactctggcaaacggagagatacgcaaacgacctttaattgaaaccaatggggagacaggtgaaatcgtatgggataagggccgggacttcgcgacggtgagaaaagttttgtccatgccccaagtcaacatagtaaagaaaactgaggtgcagaccggagggttttcaaaggaatcgattcttccaaaaaggaatagtgataagctcatcgctcgtaaaaaggactgggacccgaaaaagtacggtggcttcgatagccctacagttgcctattctgtcctagtagtggcaaaagttgagaagggaaaatccaagaaactgaagtcagtcaaagaattattggggataacgattatggagcgctcgtcttttgaaaagaaccccatcgacttccttgaggcgaaaggttacaaggaagtaaaaaaggatctcataattaaactaccaaagtatagtctgtttgagttagaaaatggccgaaaacggatgttggctagcgccggagagcttcaaaaggggaacgaactcgcactaccgtctaaatacgtgaatttcctgtatttagcgtcccattacgagaagttgaaaggttcacctgaagataacgaacagaagcaactttttgttgagcagcacaaacattatctcgacgaaatcatagagcaaatttcggaattcagtaagagagtcatcctagctgatgccaatctggacaaagtattaagcgcatacaacaagcacagggataaacccatacgtgagcaggcggaaaatattatccatttgtttactcttaccaacctcggcgctccagccgcattcaagtattttgacacaacgatagatcgcaaacgatacacttctaccaaggaggtgctagacgcgacactgattcaccaatccatcacgggattatatgaaactcggatagatttgtcacagcttgggggtgacggatcccccaagaagaagaggaaagtctcgagcgactacaaagaccatgacggtgattataaagatcatgacatcgattacaaggatgacgatgacaaggctgcagga

SEQ ID NO: 16 - protein, 1404 aa, Streptococcus pyogenes
MDKKYSIGLDIGTNSVGWAVITDEYKVPSKKFKVLGNTDRHSIKKNLIGALLFDSGETAEATRLKRTARRRYTRRKNRICYLQEIFSNEMAKVDDSFFHRLEESFLVEEDKKHERHPIFGNIVDEVAYHEKYPTIYHLRKKLVDSTDKADLRLIYLALAHMIKFRGHFLIEGDLNPDNSDVDKLFIQLVQTYNQLFEENPINASGVDAKAILSARLSKSRRLENLIAQLPGEKKNGLFGNLIALSLGLTPNFKSNFDLAEDAKLQLSKDTYDDDLDNLLAQIGDQYADLFLAAKNLSDAILLSDILRVNTEITKAPLSASMIKRYDEHHQDLTLLKALVRQQLPEKYKEIFFDQSKNGYAGYIDGGASQEEFYKFIKPILEKMDGTEELLVKLNREDLLRKQRTFDNGSIPHQIHLGELHAILRRQEDFYPFLKDNREKIEKILTFRIPYYVGPLARGNSRFAWMTRKSEETITPWNFEEVVDKGASAQSFIERMTNFDKNLPNEKVLPKHSLLYEYFTVYNELTKVKYVTEGMRKPAFLSGEQKKAIVDLLFKTNRKVTVKQLKEDYFKKIECFDSVEISGVEDRFNASLGTYHDLLKIIKDKDFLDNEENEDILEDIVLTLTLFEDREMIEERLKTYAHLFDDKVMKQLKRRRYTGWGRLSRKLINGIRDKQSGKTILDFLKSDGFANRNFMQLIHDDSLTFKEDIQKAQVSGQGDSLHEHIANLAGSPAIKKGILQTVKVVDELVKVMGRHKPENIVIEMARENQTTQKGQKNSRERMKRIEEGIKELGSQILKEHPVENTQLQNEKLYLYYLQNGRDMYVDQELDINRLSDYDVDHIVPQSFLKDDSIDNKVLTRSDKNRGKSDNVPSEEVVKKMKNYWRQLLNAKLITQRKFDNLTKAERGGLSELDKAGFIKRQLVETRQITKHVAQILDSRMNTKYDENDKLIREVKVITLKSKLVSDFRKDFQFYKVREINNYHHAHDAYLNAVVGTALIKKYPKLESEFVYGDYKVYDVRKMIAKSEQEIGKATAKYFFYSNIMNFFKTEITLANGEIRKRPLIETNGETGEIVWDKGRDFATVRKVLSMPQVNIVKKTEVQTGGFSKESILPKRNSDKLIARKKDWDPKKYGGFDSPTVAYSVLVVAKVEKGKSKKLKSVKELLGITIMERSSFEKNPIDFLEAKGYKEVKKDLIIKLPKYSLFELENGRKRMLASAGELQKGNELALPSKYVNFLYLASHYEKLKGSPEDNEQKQLFVEQHKHYLDEIIEQISEFSKRVILADANLDKVLSAYNKHRDKPIREQAENIIHLFTLTNLGAPAAFKYFDTTIDRKRYTSTKEVLDATLIHQSITGLYETRIDLSQLGGDGSPKKKRKVSSDYKDHDGDYKDHDIDYKDDDDKAAG

SEQ ID NO: 17 - DNA, 4107 bp, Streptococcus pyogenes
atggataagaaatactcaataggcttagatatcggcacaaatagcgtcggatgggcggtgatcactgatgaatataaggttccgtctaaaaagttcaaggttctgggaaatacagaccgccacagtatcaaaaaaaatcttataggggctcttttatttgacagtggagagacagcggaagcgactcgtctcaaacggacagctcgtagaaggtatacacgtcggaagaatcgtatttgttatctacaggagattttttcaaatgagatggcgaaagtagatgatagtttctttcatcgacttgaagagtcttttttggtggaagaagacaagaagcatgaacgtcatcctatttttggaaatatagtagatgaagttgcttatcatgagaaatatccaactatctatcatctgcgaaaaaaattggtagattctactgataaagcggatttgcgcttaatctatttggccttagcgcatatgattaagtttcgtggtcattttttgattgagggagatttaaatcctgataatagtgatgtggacaaactatttatccagttggtacaaacctacaatcaattatttgaagaaaaccctattaacgcaagtggagtagatgctaaagcgattctttctgcacgattgagtaaatcaagacgattagaaaatctcattgctcagctccccggtgagaagaaaaatggcttatttgggaatctcattgctttgtcattgggtttgacccctaattttaaatcaaattttgatttggcagaagatgctaaattacagctttcaaaagatacttacgatgatgatttagataatttattggcgcaaattggagatcaatatgctgatttgtttttggcagctaagaatttatcagatgctattttactttcagatatcctaagagtaaatactgaaataactaaggctcccctatcagcttcaatgattaaacgctacgatgaacatcatcaagacttgactcttttaaaagctttagttcgacaacaacttccagaaaagtataaagaaatcttttttgatcaatcaaaaaacggatatgcaggttatattgatgggggagctagccaagaagaattttataaatttatcaaaccaattttagaaaaaatggatggtactgaggaattattggtgaaactaaatcgtgaagatttgctgcgcaagcaacggacctttgacaacggctctattccccatcaaattcacttgggtgagctgcatgctattttgagaagacaagaagacttttatccatttttaaaagacaatcgtgagaagattgaaaaaatcttgacttttcgaattccttattatgttggtccattggcgcgtggcaatagtcgttttgcatggatgactcggaagtctgaagaaacaattaccccatggaattttgaagaagttgtcgataaaggtgcttcagctcaatcatttattgaacgcatgacaaactttgataaaaatcttccaaatgaaaaagtactaccaaaacatagtttgctttatgagtattttacggtttataacgaattgacaaaggtcaaatatgttactgaaggaatgcgaaaaccagcatttctttcaggtgaacagaagaaagccattgttgatttactcttcaaaacaaatcgaaaagtaaccgttaagcaattaaaagaagattatttcaaaaaaatagaatgttttgatagtgttgaaatttcaggagttgaagatagatttaatgcttcattaggtacctaccatgatttgctaaaaattattaaagataaagattttttggataatgaagaaaatgaagatatcttagaggatattgttttaacattgaccttatttgaagatagggagatgattgaggaaagacttaaaacatatgctcacctctttgatgataaggtgatgaaacagcttaaacgtcgccgttatactggttggggacgtttgtctcgaaaattgattaatggtattagggataagcaatctggcaaaacaatattagattttttgaaatcagatggttttgccaatcgcaattttatgcagctgatccatgatgatagtttgacatttaaagaagacattcaaaaagcacaagtgtctggacaaggcgatagtttacatgaacatattgcaaatttagctggtagccctgctattaaaaaaggtattttacagactgtaaaagttgttgatgaattggtcaaagtaatggggcggcataagccagaaaatatcgttattgaaatggcacgtgaaaatcagacaactcaaaagggccagaaaaattcgcgagagcgtatgaaacgaatcgaagaaggtatcaaagaattaggaagtcagattcttaaagagcatcctgttgaaaatactcaattgcaaaatgaaaagctctatctctattatctccaaaatggaagagacatgtatgtggaccaagaattagatattaatcgtttaagtgattatgatgtcgatcacattgttccacaaagtttccttaaagacgattcaatagacaataaggtcttaacgcgttctgataaaaatcgtggtaaatcggataacgttccaagtgaagaagtagtcaaaaagatgaaaaactattggagacaacttctaaacgccaagttaatcactcaacgtaagtttgataatttaacgaaagctgaacgtggaggtttgagtgaacttgataaagctggttttatcaaacgccaattggttgaaactcgccaaatcactaagcatgtggcacaaattttggatagtcgcatgaatactaaatacgatgaaaatgataaacttattcgagaggttaaagtgattaccttaaaatctaaattagtttctgacttccgaaaagatttccaattctataaagtacgtgagattaacaattaccatcatgcccatgatgcgtatctaaatgccgtcgttggaactgctttgattaagaaatatccaaaacttgaatcggagtttgtctatggtgattataaagtttatgatgttcgtaaaatgattgctaagtctgagcaagaaataggcaaagcaaccgcaaaatatttcttttactctaatatcatgaacttcttcaaaacagaaattacacttgcaaatggagagattcgcaaacgccctctaatcgaaactaatggggaaactggagaaattgtctgggataaagggcgagattttgccacagtgcgcaaagtattgtccatgccccaagtcaatattgtcaagaaaacagaagtacagacaggcggattctccaaggagtcaattttaccaaaaagaaattcggacaagcttattgctcgtaaaaaagactgggatccaaaaaaatatggtggttttgatagtccaacggtagcttattcagtcctagtggttgctaaggtggaaaaagggaaatcgaagaagttaaaatccgttaaagagttactagggatcacaattatggaaagaagttcctttgaaaaaaatccgattgactttttagaagctaaaggatataaggaagttaaaaaagacttaatcattaaactacctaaatatagtctttttgagttagaaaacggtcgtaaacggatgctggctagtgccggagaattacaaaaaggaaatgagctggctctgccaagcaaatatgtgaattttttatatttagctagtcattatgaaaagttgaagggtagtccagaagataacgaacaaaaacaattgtttgtggagcagcataagcattatttagatgagattattgagcaaatcagtgaattttctaagcgtgttattttagcagatgccaatttagataaagttcttagtgcatataacaaacatagagacaaaccaatacgtgaacaagcagaaaatattattcatttatttacgttgacgaatcttggagctcccgctgcttttaaatattttgatacaacaattgatcgtaaacgatatacgtctacaaaagaagttttagatgccactcttatccatcaatccatcactggtctttatgaaacacgcattgatttgagtcagctaggaggtgactga

SEQ ID NO: 18 - protein, 1368 aa, Streptococcus pyogenes [sequence omitted]

SEQ ID NO: 19 - protein, 1378 aa, Lactobacillus fermentum
MKEYHIGLDIGTSSIGWAVTDSQFKLMRIKGKTAIGVRLFEEGKTAAERRTFRTTRRRLKRRKWRLHYLDEIFAPHLQEVDENFLRRLKQSNIHPEDPTKNQAFIGKLLFPDLLKKNERGYPTLIKMRDELPVEQRAHYPVMNIYKLREAMINEDRQFDLREVYLAVHHIVKYRGHFLNNASVDKFKVGRIDFDKSFNVLNEAYEELQNGEGSFTIEPSKVEKIGQLLLDTKMRKLDRQKAVAKLLEVKVADKEETKRNKQIATAMSKLVLGYKADFATVAMANGNEWKIDLSSETSEDEIEKFREELSDAQNDILTEITSLFSQIMLNEIVPNGMSISESMMDRYWTHERQLAEVKEYLATQPASARKEFDQVYNKYIGQAPKERGFDLEKGLKKILSKKENWKEIDELLKAGDFLPKQRTSANGVIPHQMHQQELDRIIEKQAKYYPWLATENPATGERDRHQAKYELDQLVSFRIPYYVGPLVTPEVQKATSGAKFAWAKRKEDGEITPWNLWDKIDRAESAEAFIKRMTVKDTYLLNEDVLPANSLLYQKYNVLNELNNVRVNGRRLSVGIKQDIYTELFKKKKTVKASDVASLVMAKTRGVNKPSVEGLSDPKKFNSNLATYLDLKSIVGDKVDDNRYQTDLENIIEWRSVFEDGEIFADKLTEVEWLTDEQRSALVKKRYKGWGRLSKKLLTGIVDENGQRIIDLMWNTDQNFKEIVDQPVFKEQIDQLNQKAITNDGMTLRERVESVLDDAYTSPQNKKAIWQVVRVVEDIVKAVGNAPKSISIEFARNEGNKGEITRSRRTQLQKLFEDQAHELVKDTSLTEELEKAPDLSDRYYFYFTQGGKDMYTGDPINFDEISTKYDIDHILPQSFVKDNSLDNRVLTSRKENNKKSDQVPAKLYAAKMKPYWNQLLKQGLITQRKFENLTKDVDQNIKYRSLGFVKRQLVETRQVIKLTANILGSMYQEAGTEIIETRAGLTKQLREEFDLPKVREVNDYHHAVDAYLTTFAGQYLNRRYPKLRSFFVYGEYMKFKHGSDLKLRNFNFFHELMEGDKSQGKVVDQQTGELITTRDEVAKSFDRLLNMKYMLVSKEVHDRSDQLYGATIVTAKESGKLTSPIEIKKNRLVDLYGAYTNGTSAFMTIIKFTGNKPKYKVIGIPTTSAASLKRAGKPGSESYNQELHRIIKSNPKVKKGFEIVVPHVSYGQLIVDGDCKFTLASPTVQHPATQLVLSKKSLETISSGYKILKDKPAIANERLIRVFDEVVGQMNRYFTIFDQRSNRQKVADARDKFLSLPTESKYEGAKKVQVGKTEVITNLLMGLHANATQGDLKVLGLATFGFFQSTTGLSLSEDTMIVYQSPTGLFERRICLKDI

SEQ ID NO: 20 - protein, 1368 aa, Staphylococcus aureus [sequence omitted]

SEQ ID NO: 21 - protein, 1053 aa, Staphylococcus aureus
MGKRNYILGLDIGITSVGYGIIDYETRDVIDAGVRLFKEANVENNEGRRSKRGARRLKRRRRHRIQRVKKLLFDYNLLTDHSELSGINPYEARVKGLSQKLSEEEFSAALLHLAKRRGVHNVNEVEEDTGNELSTKEQISRNSKALEEKYVAELQLERLKKDGEVRGSINRFKTSDYVKEAKQLLKVQKAYHQLDQSFIDTYIDLLETRRTYYEGPGEGSPFGWKDIKEWYEMLMGHCTYFPEELRSVKYAYNADLYNALNDLNNLVITRDENEKLEYYEKFQIIENVFKQKKKPTLKQIAKEILVNEEDIKGYRVTSTGKPEFTNLKVYHDIKDITARKEIIENAELLDQIAKILTIYQSSEDIQEELTNLNSELTQEEIEQISNLKGYTGTHNLSLKAINLILDELWHTNDNQIAIFNRLKLVPKKVDLSQQKEIPTTLVDDFILSPVVKRSFIQSIKVINAIIKKYGLPNDIIIELAREKNSKDAQKMINEMQKRNRQTNERIEEIIRTTGKENAKYLIEKIKLHDMQEGKCLYSLEAIPLEDLLNNPFNYEVDHIIPRSVSFDNSFNNKVLVKQEENSKKGNRTPFQYLSSSDSKISYETFKKHILNLAKGKGRISKTKKEYLLEERDINRFSVQKDFINRNLVDTRYATRGLMNLLRSYFRVNNLDVKVKSINGGFTSFLRRKWKFKKERNKGYKHHAEDALIIANADFIFKEWKKLDKAKKVMENQMFEEKQAESMPEIETEQEYKEIFITPHQIKHIKDFKDYKYSHRVDKKPNRKLINDTLYSTRKDDKGNTLIVNNLNGLYDKDNDKLKKLINKSPEKLLMYHHDPQTYQKLKLIMEQYGDEKNPLYKYYEETGNYLTKYSKKDNGPVIKKIKYYGNKLNAHLDITDDYPNSRNKVVKLSLKPYRFDVYLDNGVYKFVTVKNLDVIKKENYYEVNSKCYEEAKKLKKISNQAEFIASFYKNDLIKINGELYRVIGVNNDLLNRIEVNMIDITYREYLENMNDKRPPHIIKTIASKTQSIKKYSTDILGNLYEVKSKKHPQIIKK

SEQ ID NO: 22 - protein, 1409 aa, Streptococcus thermophilus
MLFNKCIIISINLDFSNKEKCMTKPYSIGLDIGTNSVGWAVITDNYKVPSKKMKVLGNTSKKYIKKNLLGVLLFDSGITAEGRRLKRTARRRYTRRRNRILYLQEIFSTEMATLDDAFFQRLDDSFLVPDDKRDSKYPIFGNLVEEKVYHDEFPTIYHLRKYLADSTKKADLRLVYLALAHMIKYRGHFLIEGEFNSKNNDIQKNFQDFLDTYNAIFESDLSLENSKQLEEIVKDKISKLEKKDRILKLFPGEKNSGIFSEFLKLIVGNQADFRKCFNLDEKASLHFSKESYDEDLETLLGYIGDDYSDVFLKAKKLYDAILLSGFLTVTDNETEAPLSSAMIKRYNEHKEDLALLKEYIRNISLKTYNEVFKDDTKNGYAGYIDGKTNQEDFYVYLKNLLAEFEGADYFLEKIDREDFLRKQRTFDNGSIPYQIHLQEMRAILDKQAKFYPFLAKNKERIEKILTFRIPYYVGPLARGNSDFAWSIRKRNEKITPWNFEDVIDKESSAEAFINRMTSFDLYLPEEKVLPKHSLLYETFNVYNELTKVRFIAESMRDYQFLDSKQKKDIVRLYFKDKRKVTDKDIIEYLHAIYGYDGIELKGIEKQFNSSLSTYHDLLNIINDKEFLDDSSNEAIIEEIIHTLTIFEDREMIKQRLSKFENIFDKSVLKKLSRRHYTGWGKLSAKLINGIRDEKSGNTILDYLIDDGISNRNFMQLIHDDALSFKKKIQKAQIIGDEDKGNIKEVVKSLPGSPAIKKGILQSIKIVDELVKVMGGRKPESIVVEMARENQYTNQGKSNSQQRLKRLEKSLKELGSKILKENIPAKLSKIDNNALQNDRLYLYYLQNGKDMYTGDDLDIDRLSNYDIDHIIPQAFLKDNSIDNKVLVSSASNRGKSDDFPSLEVVKKRKTFWYQLLKSKLISQRKFDNLTKAERGGLLPEDKAGFIQRQLVETRQITKHVARLLDEKFNNKKDENNRAVRTVKIITLKSTLVSQFRKDFELYKVREINDFHHAHDAYLNAVIASALLKKYPKLEPEFVYGDYPKYNSFRERKSATEKVYFYSNIMNIFKKSISLADGRVIERPLIEVNEETGESVWNKESDLATVRRVLSYPQVNVVKKVEEQNHGLDRGKPKGLFNANLSSKPKPNSNENLVGAKEYLDPKKYGGYAGISNSFAVLVKGTIEKGAKKKITNVLEFQGISILDRINYRKDKLNFLLEKGYKDIELIIELPKYSLFELSDGSRRMLASILSTNNKRGEIHKGNQIFLSQKFVKLLYHAKRISNTINENHRKYVENHKKEFEELFYYILEFNENYVGAKKNGKLLNSAFQSWQNHSIDELCSSFIGPTGSERKGLFELTSRGSAADFEFLGVKIPRYRDYTPSSLLKDATLIHQSVTGLYETRIDLAKLGEG

SEQ ID NO: 23 - protein, 1402 aa, Lactobacillus crispatus
MKIKNYNLALTPSTSAVGHVEVDDDLNILEPVHHQKAIGVAKFGEGETAEARRLARSARRTTKRRANRINHYFNEIMKPEIDKVDPLMFDRIKQAGLSPLDERKEFRTVIFDRPNIASYYHNQFPTIWHLQKYLMITDEKADIRLIYWALHSLLKHRGHFFNTTPMSQFKPGKLNLKDDMLALDDYNDLEGLSFAVANSPEIEKVIKDRSMHKKEKIAELKKLIVNDVPDKDLAKRNNKIITQIVNAIMGNSFHLNFIFDMDLDKLTSKAWSFKLDDPELDTKFDAISGSMTDNQIGIFETLQKIYSAISLLDILNGSSNVVDAKNALYDKHKRDLNLYFKFLNTLPDEIAKTLKAGYTLYIGNRKKDLLAARKLLKVNVAKNFSQDDFYKLINKELKSIDKQGLQTRFSEKVGELVAQNNFLPVQRSSDNVFIPYQLNAITFNKILENQGKYYDFLVKPNPAKKDRKNAPYELSQLMQFTIPYYVGPLVTPEEQVKSGIPKTSRFAWMVRKDNGAITPWNFYDKVDIEATADKFIKRSIAKDSYLLSELVLPKHSLLYEKYEVFNELSNVSLDGKKLSGGVKQILFNEVFKKTNKVNTSRILKALAKHNIPGSKITGLSNPEEFTSSLQTYNAWKKYFPNQIDNFAYQQDLEKMIEWSTVFEDHKILAKKLDEIEWLDDDQKKFVANTRLRGWGRLSKRLLTGLKDNYGKSIMQRLETTKANFQQIVYKPEFREQIDKISQAAAKNQSLEDILANSYTSPSNRKAIRKTMSVVDEYIKLNHGKEPDKIFLMFQRSEQEKGKQTEARSKQLNRILSQLKADKSANKLFSKQLADEFSNAIKKSKYKLNDKQYFYFQQLGRDALTGEVIDYDELYKYTVLHIIPRSKLTDDSQNNKVLTKYKIVDGSVALKFGNSYSDALGMPIKAFWTELNRLKLIPKGKLLNLTTDFSTLNKYQRDGYIARQLVETQQIVKLLATIMQSRFKHTKIIEVRNSQVANIRYQFDYFRIKNLNEYYRGFDAYLAAVVGTYLYKVYPKARRLFVYGQYLKPKKTNQENQDMHLDSEKKSQGFNFLWNLLYGKQDQIFVNGTDVIAFNRKDLITKMNTVYNYKSQKISLAIDYHNGAMFKATLFPRNDRDTAKTRKLIPKKKDYDTDIYGGYTSNVDGYMLLAEIIKRDGNKQYGFYGVPSRLVSELDTLKKTRYTEYEEKLKEIIKPELGVDLKKIKKIKILKNKVPFNQVIIDKGSKFFITSTSYRWNYRQLILSAESQQTLMDLVVDPDFSNHKARKDARKNADERLIKVYEEILYQVKNYMPMFVELHRCYEKLVDAQKTFKSLKISDKAMVLNQILILLHSNATSPVLEKLGYHTRFTLGKKHNLISENAVLVTQSITGLKENHVSIKQML

SEQ ID NO: 24 - protein, 1385 aa, Pedicoccus damnosus
MTNEKYSIGLDIGTSSIGFAVVNDNNRVIRVKGKNAIGVRLFDEGKAAADRRSFRTTRRSFRTTRRRLSRRRWRLKLLREIFDAYITPVDEAFFIRLKESNLSPKDSKKQYSGDILFNDRSDKDFYEKYPTIYHLRNALMTEHRKFDVREIYLAIHHIMKFRGHFLNATPANNFKVGRLNLEEKFEELNDIYQRVFPDESIEFRTDNLEQIKEVLLDNKRSRADRQRTLVSDIYQSSEDKDIEKRNKAVATEILKASLGNKAKLNVITNVEVDKEAAKEWSITFDSESIDDDLAKIEGQMTDDGHEIIEVLRSLYSGITLSAIVPENHTLSQSMVAKYDLHKDHLKLFKKLINGMTDTKKAKNLRAAYDGYIDGVKGKVLPQEDFYKQVQVNLDDSAEANEIQTYIDQDIFMPKQRTKANGSIPHQLQQQELDQIIENQKAYYPWLAELNPNPDKKRQQLAKYKLDELVTFRVPYYVGPMITAKDQKNQSGAEFAWMIRKEPGNITPWNFDQKVDRMATANQFIKRMTTTDTYLLGEDVLPAQSLLYQKFEVLNELNKIRIDHKPISIEQKQQIFNDLFKQFKNVTIKHLQDYLVSQGQYSKRPLIEGLADEKRFNSSLSTYSDLCGIFGAKLVEENDRQEDLEKIIEWSTIFEDKKIYRAKLNDLTWLTDDQKEKLATKRYQGWGRLSRKLLVGLKNSEHRNIMDILWITNENFMQIQAEPDFAKLVTDANKGMLEKTDSQDVINDLYTSPQNKKAIRQILLVVHDIQNAMHGQAPAKIHVEFARGEERNPRRSVQRQRQVEAAYEKVSNELVSAKVRQEFKEAINNKRDFKDRLFLYFMQGGIDIYTGKQLNIDQLSSYQIDHILPQAFVKDDSLTNRVLTNENQVKADSVPIDIFGKKMLSVWGRMKDQGLISKGKYRNLTMNPENISAHTENGFINRQLVETRQVIKLAVNILADEYGDSTQIISVKADLSHQMREDFELLKNRDVNDYHHAFDAYLAAFIGNYLLKRYPKLESYFVYGDFKKFTQKETKMRRFNFIYDLKHCDQVVNKETGEILWTKDEDIKYIRHLFAYKKILVSHEVREKRGALYNQTIYKAKDDKGSGQESKKLIRIKDDKETKIYGGYSGKSLAYMTIVQITKKNKVSYRVIGIPTLALARLNKLENDSTENNGELYKIIKPQFTHYKVDKKNGEIIETTDDFKIVVSKVRFQQLIDDAGQFFMLASDTYKNNAQQLVISNNALKAINNTNITDCPRDDLERLDNLRLDSAFDEIVKKMDKYFSAYDANNFREKIRNSNLIFYQLPVEDQWENNKITELGKRTVLTRILQGLHANATTTDMSIFKIKTPFGQLRQRSGISLSENAQLIYQSPTGLFERRVQLNKIK

SEQ ID NO: 25 - protein, 1367 aa, Fusobaterium nucleatum
MKKQKFSDYYLGFDIGTNSVGWCVTDLDYNVLRFNKKDMWGSRLFEEAKTAAERRVQRNSRRRLKRRKWRLNLLEEIFSNEILKIDSNFFRRLKESSLWLEDKSSKEKFTLFNDDNYKDYDFYKQYPTIFHLRNELIKNPEKKDIRLVYLAIHSIFKSRGHFLFEGQNLKEIKNFETLYNNLIAFLEDNGINKIIDKNNIEKLEKIVCDSKKGLKDKEKEFKEIFNSDKQLVAIFKLSVGSSVSLNDLFDTDEYKKGEVEKEKISFREQIYEDDKPIYYSILGEKIELLDIAKTFYDFMVLNNILADSQYISEAKVKLYEEHKKDLKNLKYIIRKYNKGNYDKLFKDKNENNYSAYIGLNKEKSKKEVIEKSRLKIDDLIKNIKGYLPKVEEIEEKDKAIFNKILNKIELKTILPKQRISDNGTLPYQIHEAELEKILENQSKYYDFLNYEENGIITKDKLLMTFKFRIPYYVGPLNSYHKDKGGNSWIVRKEEGKILPWNFEQKVDIEKSAEEFIKRMTNKCTYLNGEDVIPKDTFLYSEYVILNELNKVQVNDEFLNEENKRKIIDELFKENKKVSEKKFKEYLLVKQIVDGTIELKGVKDSFNSNYISYIRFKDIFGEKLNLDIYKEISEKSILWKCLYGDDKKIFEKKIKNEYGDILTKDEIKKINTFKFNNWGRLSEKLLTGIEFINLETGECYSSVMDALRRTNYNLMELLSSKFTLQESINNENKEMNEASYRDLIEESYVSPSLKRAIFQTLKIYEEIRKITGRVPKKVFIEMARGGDESMKNKKIPARQEQLKKLYDSCGNDIANFSIDIKEMKNSLISYDNNSLRQKKLYLYYLQFGKCMYTGREIDLDRLLQNNDTYDIDHIYPRSKVIKDDSFDNLVLVLKNENAEKSNEYPVKKEIQEKMKSFWRFLKEKNFISDEKYKRLTGKDDFELRGFMARQLVNVRQTTKEVGKILQQIEPEIKIVYSKAEIASSFREMFDFIKVRELNDTHHAKDAYLNIVAGNVYNTKFTEKPYRYLQEIKENYDVKKIYNYDIKNAWDKENSLEIVKKNMEKNTVNITRFIKEKKGQLFDLNPIKKGETSNEIISIKPKVYNGKDDKLNEKYGYYKSLNPAYFLYVEHKEKNKRIKSFERVNLVDVNNIKDEKSLVKYLIENKKLVEPRVIKKVYKRQVILINDYPYSIVTLDSNKLMDFENLKPLFLENKYEKILKNVIKFLEDNQGKSEENYKFIYLKKKDRYEKNETLESVKDRYNLEFNEMYDKFLEKLDSKDYKNYMNNKKYQELLDVKEKFIKLNLFDKAFTLKSFLDLFNRKTMADFSKVGLTKYLGKIQKISSNVLSKNELYLLEESVTGLFVKKIKL

SEQ ID NO: 26 - protein, 1286 aa, Enterococcus cecorum
RRKQRIQILQELLGEEVLKTDPGFFHRMKESRYVVEDKRTLDGKQVELPYALFVDKDYTDKEYYKQFPTINHLIVYLMTTSDTPDIRLVYLALHYYMKNRGNFLHSGDINNVKDINDILEQLDNVLETFLDGWNLKLKSYVEDIKNIYNRDLGRGERKKAFVNTLGAKTKAEKAFCSLISGGSTNLAELFDDSSLKEIETPKIEFASSSLEDKIDGIQEALEDRFAVIEAAKRLYDWKTLTDILGDSSSLAEARVNSYQMHHEQLLELKSLVKEYLDRKVFQEVFVSLNVANNYPAYIGHTKINGKKKELEVKRTKRNDFYSYVKKQVIEPIKKKVSDEAVLTKLSEIESLIEVDKYLPLQVNSDNGVIPYQVKLNELTRIFDNLENRIPVLRENRDKIIKTFKFRIPYYVGSLNGVVKNGKCTNWMVRKEEGKIYPWNFEDKVDLEASAEQFIRRMTNKCTYLVNEDVLPKYSLLYSKYLVLSELNNLRIDGRPLDVKIKQDIYENVFKKNRKVTLKKIKKYLLKEGIITDDDELSGLADDVKSSLTAYRDFKEKLGHLDLSEAQMENIILNITLFGDDKKLLKKRLAALYPFIDDKSLNRIATLNYRDWGRLSERFLSGITSVDQETGELRTIIQCMYETQANLMQLLAEPYHFVEAIEKENPKVDLESISYRIVNDLYVSPAVKRQIWQTLLVIKDIKQVMKHDPERIFIEMAREKQESKKTKSRKQVLSEVYKKAKEYEHLFEKLNSLTEEQLRSKKIYLYFTQLGKCMYSGEPIDFENLVSANSNYDIDHIYPQSKTIDDSFNNIVLVKKSLNAYKSNHYPIDKNIRDNEKVKTLWNTLVSKGLITKEKYERLIRSTPFSDEELAGFIARQLVETRQSTKAVAEILSNWFPESEIVYSKAKNVSNFRQDFEILKVRELNDCHHAHDAYLNIVVGNAYHTKFTNSPYRFIKNKANQEYNLRKLLQKVNKIESNGVVAWVGQSENNPGTIATVKKVIRRNTVLISRMVKEVDGQLFDLTLMKKGKGQVPIKSSDERLTDISKYGGYNKATGAYFTFVKSKKRGKVVRSFEYVPLHLSKQFENNNELLKEYIEKDRGLTDVEILIPKVLINSLFRYNGSLVRITGRGDTRLLLVHEQPLYVSNSFVQQLKSVSSYKLKKSENDNAKLTKTATEKLSNIDELYDGLLRKLDLPIYSYWFSSIKEYLVESRTKYIKLSIEEKALVIFEILHLFQSDAQVPNLKILGLSTKPSRIRIQKNLKDTDKMSIIHQSPSGIFEHEIELTSL

SEQ ID NO: 27 - protein, 1312 aa, Anaerostipes hadrus
MQNGFLGITVSSEQVGWAVTNPKYELERASRKDLWGVRLFDKAETAEDRRMFRTNRRLNQRKKNRIHYLRDIFHEEVNQKDPNFFQQLDESNFCEDDRTVEFNFDTNLYKNQFPTVYHLRKYLMETKDKPDIRLVYLAFSKFMKNRGHFLYKGNLGEVMDFENSMKGFCESLEKFNIDFPTLSDEQVKEVRDILCDHKIAKTVKKKNIITITKVKSKTAKAWIGLFCGCSVPVKVLFQDIDEEIVTDPEKISFEDASYDDYIANIEKGVGIYYEAIVSAKMLFDWSILNEILGDHQLLSDAMIAEYNKHHDDLKRLQKIIKGTGSRELYQDIFINDVSGNYVCYVGHAKTMSSADQKQFYTFLKNRLKNVNGISSEDAEWIDTEIKNGTLLPKQTKRDNSVIPHQLQLREFELILDNMQEMYPFLKENREKLLKIFNFVIPYYVGPLKGVVRKGESTNWMVPKKDGVIHPWNFDEMVDKEASAECFISRMTGNCSYLFNEKVLPKNSLLYETFEVLNELNPLKINGEPISVELKQRIYEQLFLTGKKVTKKSLTKYLIKNGYDKDIELSGIDNEFHSNLKSHIDFEDYDNLSDEEVEQIILRITVFEDKQLLKDYLNREFVKLSEDERKQICSLSYKGWGNLSEMLLNGITVTDSNGVEVSVMDMLWNTNLNLMQILSKKYGYKAEIEHYNKEHEKTIYNREDLMDYLNIPPAQRRKVNQLITIVKSLKKTYGVPNKIFFKISREHQDDPKRTSSRKEQLKYLYKSLKSEDEKHLMKELDELNDHELSNDKVYLYFLQKGRCIYSGKKLNLSRLRKSNYQNDIDYIYPLSAVNDRSMNNKVLTGIQENRADKYTYFPVDSEIQKKMKGFWMELVLQGFMTKEKYFRLSRENDFSKSELVSFIEREISDNQQSGRMIASVLQYYFPESKIVFVKEKLISSFKRDFHLISSYGHNHLQAAKDAYITIVVGNVYHTKFTMDPAIYFKNHKRKDYDLNRLFLENISRDGQIAWESGPYGSIQTVRKEYAQNHIAVTKRVVEVKGGLFKQMPLKKGHGEYPLKTNDPRFGNIAQYGGYTNVTGSYFVLVESMEKGKKRISLEYVPVYLHERLEDDPGHKLLKEYLVDHRKLNHPKILLAKVRKNSLLKIDGFYYRLNGRSGNALILTNAVELIMDDWQTKTANKISGYMKRRAIDKKARVYQNEFHIQELEQLYDFYLDKLKNGVYKNRKNNQAELIHNEKEQFMELKTEDQCVLLTEIKKLFVCSPMQADLTLIGGSKHTGMIAMSSNVTKADFAVIAEDPLGLRNKVIYSHKGEK

SEQ ID NO: 28 - protein, 1344 aa, Kandleria vitulina
MSQNNNKIYNIGLDIGDASVGWAVVDEHYNLLKRHGKHMWGSRLFTQANTAVERRSSRSTRRRYNKRRERIRLLREIMEDMVLDVDPTFFIRLANVSFLDQEDKKDYLKENYHSNYNLFIDKDFNDKTYYDKYPTIYHLRKHLCESKEKEDPRLIYLALHHIVKYRGNFLYEGQKFSMDVSNIEDKMIDVLRQFNEINLFEYVEDRKKIDEVLNVLKEPLSKKHKAEKAFALFDTTKDNKAAYKELCAALAGNKFNVTKMLKEAELHDEDEKDISFKFSDATFDDAFVEKQPLLGDCVEFIDLLHDIYSWVELQNILGSAHTSEPSISAAMIQRYEDHKNDLKLLKDVIRKYLPKKYFEVFRDEKSKKNNYCNYINHPSKTPVDEFYKYIKKLIEKIDDPDVKTILNKIELESFMLKQNSRTNGAVPYQMQLDELNKILENQSVYYSDLKDNEDKIRSILTFRIPYYFGPLNITKDRQFDWIIKKEGKENERILPWNANEIVDVDKTADEFIKRMRNFCTYFPDEPVMAKNSLTVSKYEVLNEINKLRINDHLIKRDMKDKMLHTLFMDHKSISANAMKKWLVKNQYFSNTDDIKIEGFQKENACSTSLTPWIDFTKIFGKINESNYDFIEKIIYDVTVFEDKKILRRRLKKEYDLDEEKIKKILKLKYSGWSRLSKKLLSGIKTKYKDSTRTPETVLEVMERTNMNLMQVINDEKLGFKKTIDDANSTSVSGKFSYAEVQELAGSPAIKRGIWQALLIVDEIKKIMKHEPAHVYIEFARNEDEKERKDSFVNQMLKLYKDYDFEDETEKEANKHLKGEDAKSKIRSERLKLYYTQMGKCMYTGKSLDIDRLDTYQVDHIVPQSLLKDDSIDNKVLVLSSENQRKLDDLVIPSSIRNKMYGFWEKLFNNKIISPKKFYSLIKTEFNEKDQERFINRQIVETRQITKHVAQIIDNHYENTKVVTVRADLSHQFRERYHIYKNRDINDFHHAHDAYIATILGTYIGHRFESLDAKYIYGEYKRIFRNQKNKGKEMKKNNDGFILNSMRNIYADKDTGEIVWDPNYIDRIKKCFYYKDCFVTKKLEENNGTFFNVTVLPNDTNSDKDNTLATVPVNKYRSNVNKYGGFSGVNSFIVAIKGKKKKGKKVIEVNKLTGIPLMYKNADEEIKINYLKQAEDLEEVQIGKEILKNQLIEKDGGLYYIVAPTEIINAKQLILNESQTKLVCEIYKAMKYKNYDNLDSEKIIDLYRLLINKMELYYPEYRKQLVKKFEDRYEQLKVISIEEKCNIIKQILATLHCNSSIGKIMYSDFKISTTIGRLNGRTISLDDISFIAESPTGMYSKKYKL

SEQ ID NO: 29 - protein, 1288 aa, Enterococcus faecalis
MRLFEEGHTAEDRRLKRTARRRISRRRNRLRYLQAFFEEAMTDLDENFFARLQESFLVPEDKKWHRHPIFAKLEDEVAYHETYPTIYHLRKKLADSSEQADLRLIYLALAHIVKYRGHFLIEGKLSTENTSVKDQFQQFMVIYNQTFVNGESRLVSAPLPESVLIEEELTEKASRTKKSEKVLQQFPQEKANGLFGQFLKLMVGNKADFKKVFGLEEEAKITYASESYEEDLEGILAKVGDEYSDVFLAAKNVYDAVELSTILADSDKKSHAKLSSSMIVRFTEHQEDLKKFKRFIRENCPDEYDNLFKNEQKDGYAGYIAHAGKVSQLKFYQYVKKIIQDIAGAEYFLEKIAQENFLRKQRTFDNGVIPHQIHLAELQAIIHRQAAYYPFLKENQEKIEQLVTFRIPYYVGPLSKGDASTFAWLKRQSEEPIRPWNLQETVDLDQSATAFIERMTNFDTYLPSEKVLPKHSLLYEKFMVFNELTKISYTDDRGIKANFSGKEKEKIFDYLFKTRRKVKKKDIIQFYRNEYNTEIVTLSGLEEDQFNASFSTYQDLLKCGLTRAELDHPDNAEKLEDIIKILTIFEDRQRIRTQLSTFKGQFSAEVLKKLERKHYTGWGRLSKKLINGIYDKESGKTILDYLVKDDGVSKHYNRNFMQLINDSQLSFKNAIQKAQSSEHEETLSETVNELAGSPAIKKGIYQSLKIVDELVAIMGYAPKRIVVEMARENQTTSTGKRRSIQRLKIVEKAMAEIGSNLLKEQPTTNEQLRDTRLFLYYMQNGKDMYTGDELSLHRLSHYDIDHIIPQSFMKDDSLDNLVLVGSTENRGKSDDVPSKEVVKDMKAYWEKLYAAGLISQRKFQRLTKGEQGGLTLEDKAHFIQRQLVETRQITKNVAGILDQRYNAKSKEKKVQIITLKASLTSQFRSIFGLYKVREVNDYHHGQDAYLNCVVATTLLKVYPNLAPEFVYGEYPKFQTFKENKATAKAIIYTNLLRFFTEDEPRFTKDGEILWSNSYLKTIKKELNYHQMNIVKKVEVQKGGFSKESIKPKGPSNKLIPVKNGLDPQKYGGFDSPVVAYTVLFTHEKGKKPLIKQEILGITIMEKTRFEQNPILFLEEKGFLRPRVLMKLPKYTLYEFPEGRRRLLASAKEAQKGNQMVLPEHLLTLLYHAKQCLLPNQSESLAYVEQHQPEFQEILERVVDFAEVHTLAKSKVQQIVKLFEANQTADVKEIAASFIQLMQFNAMGAPSTFKFFQKDIERARYTSIKEIFDATIIYQSPTGLYETRRKVVD

SEQ ID NO: 30 - protein, 1052 aa, Staphylococcus aureus
KRNYILGLDIGITSVGYGIIDYETRDVIDAGVRLFKEANVENNEGRRSKRGARRLKRRRRHRIQRVKKLLFDYNLLTDHSELSGINPYEARVKGLSQKLSEEEFSAALLHLAKRRGVHNVNEVEEDTGNELSTKEQISRNSKALEEKYVAELQLERLKKDGEVRGSINRFKTSDYVKEAKQLLKVQKAYHQLDQSFIDTYIDLLETRRTYYEGPGEGSPFGWKDIKEWYEMLMGHCTYFPEELRSVKYAYNADLYNALNDLNNLVITRDENEKLEYYEKFQIIENVFKQKKKPTLKQIAKEILVNEEDIKGYRVTSTGKPEFTNLKVYHDIKDITARKEIIENAELLDQIAKILTIYQSSEDIQEELTNLNSELTQEEIEQISNLKGYTGTHNLSLKAINLILDELWHTNDNQIAIFNRLKLVPKKVDLSQQKEIPTTLVDDFILSPVVKRSFIQSIKVINAIIKKYGLPNDIIIELAREKNSKDAQKMINEMQKRNRQTNERIEEIIRTTGKENAKYLIEKIKLHDMQEGKCLYSLEAIPLEDLLNNPFNYEVDHIIPRSVSFDNSFNNKVLVKQEENSKKGNRTPFQYLSSSDSKISYETFKKHILNLAKGKGRISKTKKEYLLEERDINRFSVQKDFINRNLVDTRYATRGLMNLLRSYFRVNNLDVKVKSINGGFTSFLRRKWKFKKERNKGYKHHAEDALIIANADFIFKEWKKLDKAKKVMENQMFEEKQAESMPEIETEQEYKEIFITPHQIKHIKDFKDYKYSHRVDKKPNRELINDTLYSTRKDDKGNTLIVNNLNGLYDKDNDKLKKLINKSPEKLLMYHHDPQTYQKLKLIMEQYGDEKNPLYKYYEETGNYLTKYSKKDNGPVIKKIKYYGNKLNAHLDITDDYPNSRNKVVKLSLKPYRFDVYLDNGVYKFVTVKNLDVIKKENYYEVNSKCYEEAKKLKKISNQAEFIASFYNNDLIKINGELYRVIGVNNDLLNRIEVNMIDITYREYLENMNDKRPPRIIKTIASKTQSIKKYSTDILGNLYEVKSKKHPQIIKKG

SEQ ID NO: 31 - protein, 1082 aa, Geobacillus thermodenitrificans
MKYKIGLDIGITSIGWAVINLDIPRIEDLGVRIFDRAENPKTGESLALPRRLARSARRRLRRRKHRLERIRRLFVREGILTKEELNKLFEKKHEIDVWQLRVEALDRKLNNDELARILLHLAKRRGFRSNRKSERTNKENSTMLKHIEENQSILSSYRTVAEMVVKDPKFSLHKRNKEDNYTNTVARDDLEREIKLIFAKQREYGNIVCTEAFEHEYISIWASQRPFASKDDIEKKVGFCTFEPKEKRAPKATYTFQSFTVWEHINKLRLVSPGGIRALTDDERRLIYKQAFHKNKITFHDVRTLLNLPDDTRFKGLLYDRNTTLKENEKVRFLELGAYHKIRKAIDSVYGKGAAKSFRPIDFDTFGYALTMFKDDTDIRSYLRNEYEQNGKRMENLADKVYDEELIEELLNLSFSKFGHLSLKALRNILPYMEQGEVYSTACERAGYTFTGPKKKQKTVLLPNIPPIANPVVMRALTQARKVVNAIIKKYGSPVSIHIELARELSQSFDERRKMQKEQEGNRKKNETAIRQLVEYGLTLNPTGLDIVKFKLWSEQNGKCAYSLQPIEIERLLEPGYTEVDHVIPYSRSLDDSYTNKVLVLTKENREKGNRTPAEYLGLGSERWQQFETFVLTNKQFSKKKRDRLLRLHYDENEENEFKNRNLNDTRYISRFLANFIREHLKFADSDDKQKVYTVNGRITAHLRSRWNFNKNREESNLHHAVDAAIVACTTPSDIARVTAFYQRREQNKELSKKTDPQFPQPWPHFADELQARLSKNPKESIKALNLGNYDNEKLESLQPVFVSRMPKRSITGAAHQETLRRYIGIDERSGKIQTVVKKKLSEIQLDKTGHFPMYGKESDPRTYEAIRQRLLEHNNDPKKAFQEPLYKPKKNGELGPIIRTIKIIDTTNQVIPLNDGKTVAYNSNIVRVDVFEKDGKYYCVPIYTIDMMKGILPNKAIEPNKPYSEWKEMTEDYTFRFSLYPNDLIRIEFPREKTIKTAVGEEIKIKDLFAYYQTIDSSNGGLSLVSHDNNFSLRSIGSRTLKRFEKYQVDVLGNIYKVRGEKRVGVASSSHSKAGETIRPL

SEQ ID NO: 32 - protein, 1375 aa, S. canis
MEKKYSIGLDIGTNSVGWAVITDDYKVPSKKFKVLGNTNRKSIKKNLMGALLFDSGETAEATRLKRTARRRYTRRKNRIRYLQEIFANEMAKLDDSFFQRLEESFLVEEDKKNERHPIFGNLADEVAYHRNYPTIYHLRKKLADSPEKADLRLIYLALAHIIKFRGHFLIEGKLNAENSDVAKLFYQLIQTYNQLFEESPLDEIEVDAKGILSARLSKSKRLEKLIAVFPNEKKNGLFGNIIALALGLTPNFKSNFDLTEDAKLQLSKDTYDDDLDELLGQIGDQYADLFSAAKNLSDAILLSDILRSNSEVTKAPLSASMVKRYDEHHQDLALLKTLVRQQFPEKYAEIFKDDTKNGYAGYVGIGIKHRKRTTKLATQEEFYKFIKPILEKMDGAEELLAKLNRDDLLRKQRTFDNGSIPHQIHLKELHAILRRQEEFYPFLKENREKIEKILTFRIPYYVGPLARGNSRFAWLTRKSEEAITPWNFEEVVDKGASAQSFIERMTNFDEQLPNKKVLPKHSLLYEYFTVYNELTKVKYVTERMRKPEFLSGEQKKAIVDLLFKTNRKVTVKQLKEDYFKKIECFDSVEIIGVEDRFNASLGTYHDLLKIIKDKDFLDNEENEDILEDIVLTLTLFEDREMIEERLKTYAHLFDDKVMKQLKRRHYTGWGRLSRKMINGIRDKQSGKTILDFLKSDGFSNRNFMQLIHDDSLTFKEEIEKAQVSGQGDSLHEQIADLAGSPAIKKGILQTVKIVDELVKVMGHKPENIVIEMARENQTTTKGLQQSRERKKRIEEGIKELESQILKENPVENTQLQNEKLYLYYLQNGRDMYVDQELDINRLSDYDVDHIVPQSFIKDDSIDNKVLTRSVENRGKSDNVPSEEVVKKMKNYWRQLLNAKLITQRKFDNLTKAERGGLSEADKAGFIKRQLVETRQITKHVARILDSRMNTKRDKNDKPIREVKVITLKSKLVSDFRKDFQLYKVRDINNYHHAHDAYLNAVVGTALIKKYPKLESEFVYGDYKVYDVRKMIAKSEQEIGKATAKRFFYSNIMNFFKTEVKLANGEIRKRPLIETNGETGEVVWNKEKDFATVRKVLAMPQVNIVKKTEVQTGGFSKESILSKRESAKLIPRKKGWDTRKYGGFGSPTVAYSILVVAKVEKGKAKKLKSVKVLVGITIMEKGSYEKDPIGFLEAKGYKDIKKELIFKLPKYSLFELENGRRRMLASATELQKANELVLPQHLVRLLYYTQNISATTGSNNLGYIEQHREEFKEIFEKIIDFSEKYILKNKVNSNLKSSFDEQFAVSDSILLSNSFVSLLKYTSFGASGGFTFLDLDVKQGRLRYQTVTEVLDATLIYQSITGLYETRTDLSQLGGD

SEQ ID NO: 33 - protein, 1368 aa, Streptococcus pyogenes
  misc_feature (10)..(10): Xaa can be any naturally occurring amino acid
  misc_feature (840)..(840): Xaa can be any naturally occurring amino acid
MDKKYSIGLXIGTNSVGWAVITDEYKVPSKKFKVLGNTDRHSIKKNLIGALLFDSGETAEATRLKRTARRRYTRRKNRICYLQEIFSNEMAKVDDSFFHRLEESFLVEEDKKHERHPIFGNIVDEVAYHEKYPTIYHLRKKLVDSTDKADLRLIYLALAHMIKFRGHFLIEGDLNPDNSDVDKLFIQLVQTYNQLFEENPINASGVDAKAILSARLSKSRRLENLIAQLPGEKKNGLFGNLIALSLGLTPNFKSNFDLAEDAKLQLSKDTYDDDLDNLLAQIGDQYADLFLAAKNLSDAILLSDILRVNTEITKAPLSASMIKRYDEHHQDLTLLKALVRQQLPEKYKEIFFDQSKNGYAGYIDGGASQEEFYKFIKPILEKMDGTEELLVKLNREDLLRKQRTFDNGSIPHQIHLGELHAILRRQEDFYPFLKDNREKIEKILTFRIPYYVGPLARGNSRFAWMTRKSEETITPWNFEEVVDKGASAQSFIERMTNFDKNLPNEKVLPKHSLLYEYFTVYNELTKVKYVTEGMRKPAFLSGEQKKAIVDLLFKTNRKVTVKQLKEDYFKKIECFDSVEISGVEDRFNASLGTYHDLLKIIKDKDFLDNEENEDILEDIVLTLTLFEDREMIEERLKTYAHLFDDKVMKQLKRRRYTGWGRLSRKLINGIRDKQSGKTILDFLKSDGFANRNFMQLIHDDSLTFKEDIQKAQVSGQGDSLHEHIANLAGSPAIKKGILQTVKVVDELVKVMGRHKPENIVIEMARENQTTQKGQKNSRERMKRIEEGIKELGSQILKEHPVENTQLQNEKLYLYYLQNGRDMYVDQELDINRLSDYDVDXIVPQSFLKDDSIDNKVLTRSDKNRGKSDNVPSEEVVKKMKNYWRQLLNAKLITQRKFDNLTKAERGGLSELDKAGFIKRQLVETRQITKHVAQILDSRMNTKYDENDKLIREVKVITLKSKLVSDFRKDFQFYKVREINNYHHAHDAYLNAVVGTALIKKYPKLESEFVYGDYKVYDVRKMIAKSEQEIGKATAKYFFYSNIMNFFKTEITLANGEIRKRPLIETNGETGEIVWDKGRDFATVRKVLSMPQVNIVKKTEVQTGGFSKESILPKRNSDKLIARKKDWDPKKYGGFDSPTVAYSVLVVAKVEKGKSKKLKSVKELLGITIMERSSFEKNPIDFLEAKGYKEVKKDLIIKLPKYSLFELENGRKRMLASAGELQKGNELALPSKYVNFLYLASHYEKLKGSPEDNEQKQLFVEQHKHYLDEIIEQISEFSKRVILADANLDKVLSAYNKHRDKPIREQAENIIHLFTLTNLGAPAAFKYFDTTIDRKRYTSTKEVLDATLIHQSITGLYETRIDLSQLGGD

SEQ ID NO: 34 - protein, 1368 aa, Streptococcus pyogenes
MDKKYSIGLAIGTNSVGWAVITDEYKVPSKKFKVLGNTDRHSIKKNLIGALLFDSGETAEATRLKRTARRRYTRRKNRICYLQEIFSNEMAKVDDSFFHRLEESFLVEEDKKHERHPIFGNIVDEVAYHEKYPTIYHLRKKLVDSTDKADLRLIYLALAHMIKFRGHFLIEGDLNPDNSDVDKLFIQLVQTYNQLFEENPINASGVDAKAILSARLSKSRRLENLIAQLPGEKKNGLFGNLIALSLGLTPNFKSNFDLAEDAKLQLSKDTYDDDLDNLLAQIGDQYADLFLAAKNLSDAILLSDILRVNTEITKAPLSASMIKRYDEHHQDLTLLKALVRQQLPEKYKEIFFDQSKNGYAGYIDGGASQEEFYKFIKPILEKMDGTEELLVKLNREDLLRKQRTFDNGSIPHQIHLGELHAILRRQEDFYPFLKDNREKIEKILTFRIPYYVGPLARGNSRFAWMTRKSEETITPWNFEEVVDKGASAQSFIERMTNFDKNLPNEKVLPKHSLLYEYFTVYNELTKVKYVTEGMRKPAFLSGEQKKAIVDLLFKTNRKVTVKQLKEDYFKKIECFDSVEISGVEDRFNASLGTYHDLLKIIKDKDFLDNEENEDILEDIVLTLTLFEDREMIEERLKTYAHLFDDKVMKQLKRRRYTGWGRLSRKLINGIRDKQSGKTILDFLKSDGFANRNFMQLIHDDSLTFKEDIQKAQVSGQGDSLHEHIANLAGSPAIKKGILQTVKVVDELVKVMGRHKPENIVIEMARENQTTQKGQKNSRERMKRIEEGIKELGSQILKEHPVENTQLQNEKLYLYYLQNGRDMYVDQELDINRLSDYDVDAIVPQSFLKDDSIDNKVLTRSDKNRGKSDNVPSEEVVKKMKNYWRQLLNAKLITQRKFDNLTKAERGGLSELDKAGFIKRQLVETRQITKHVAQILDSRMNTKYDENDKLIREVKVITLKSKLVSDFRKDFQFYKVREINNYHHAHDAYLNAVVGTALIKKYPKLESEFVYGDYKVYDVRKMIAKSEQEIGKATAKYFFYSNIMNFFKTEITLANGEIRKRPLIETNGETGEIVWDKGRDFATVRKVLSMPQVNIVKKTEVQTGGFSKESILPKRNSDKLIARKKDWDPKKYGGFDSPTVAYSVLVVAKVEKGKSKKLKSVKELLGITIMERSSFEKNPIDFLEAKGYKEVKKDLIIKLPKYSLFELENGRKRMLASAGELQKGNELALPSKYVNFLYLASHYEKLKGSPEDNEQKQLFVEQHKHYLDEIIEQISEFSKRVILADANLDKVLSAYNKHRDKPIREQAENIIHLFTLTNLGAPAAFKYFDTTIDRKRYTSTKEVLDATLIHQSITGLYETRIDLSQLGGD

SEQ ID NO: 35 - protein, 1368 aa, Streptococcus pyogenes
  misc_feature (10)..(10): Xaa can be any naturally occurring amino acid
MDKKYSIGLXIGTNSVGWAVITDEYKVPSKKFKVLGNTDRHSIKKNLIGALLFDSGETAEATRLKRTARRRYTRRKNRICYLQEIFSNEMAKVDDSFFHRLEESFLVEEDKKHERHPIFGNIVDEVAYHEKYPTIYHLRKKLVDSTDKADLRLIYLALAHMIKFRGHFLIEGDLNPDNSDVDKLFIQLVQTYNQLFEENPINASGVDAKAILSARLSKSRRLENLIAQLPGEKKNGLFGNLIALSLGLTPNFKSNFDLAEDAKLQLSKDTYDDDLDNLLAQIGDQYADLFLAAKNLSDAILLSDILRVNTEITKAPLSASMIKRYDEHHQDLTLLKALVRQQLPEKYKEIFFDQSKNGYAGYIDGGASQEEFYKFIKPILEKMDGTEELLVKLNREDLLRKQRTFDNGSIPHQIHLGELHAILRRQEDFYPFLKDNREKIEKILTFRIPYYVGPLARGNSRFAWMTRKSEETITPWNFEEVVDKGASAQSFIERMTNFDKNLPNEKVLPKHSLLYEYFTVYNELTKVKYVTEGMRKPAFLSGEQKKAIVDLLFKTNRKVTVKQLKEDYFKKIECFDSVEISGVEDRFNASLGTYHDLLKIIKDKDFLDNEENEDILEDIVLTLTLFEDREMIEERLKTYAHLFDDKVMKQLKRRRYTGWGRLSRKLINGIRDKQSGKTILDFLKSDGFANRNFMQLIHDDSLTFKEDIQKAQVSGQGDSLHEHIANLAGSPAIKKGILQTVKVVDELVKVMGRHKPENIVIEMARENQTTQKGQKNSRERMKRIEEGIKELGSQILKEHPVENTQLQNEKLYLYYLQNGRDMYVDQELDINRLSDYDVDHIVPQSFLKDDSIDNKVLTRSDKNRGKSDNVPSEEVVKKMKNYWRQLLNAKLITQRKFDNLTKAERGGLSELDKAGFIKRQLVETRQITKHVAQILDSRMNTKYDENDKLIREVKVITLKSKLVSDFRKDFQFYKVREINNYHHAHDAYLNAVVGTALIKKYPKLESEFVYGDYKVYDVRKMIAKSEQEIGKATAKYFFYSNIMNFFKTEITLANGEIRKRPLIETNGETGEIVWDKGRDFATVRKVLSMPQVNIVKKTEVQTGGFSKESILPKRNSDKLIARKKDWDPKKYGGFDSPTVAYSVLVVAKVEKGKSKKLKSVKELLGITIMERSSFEKNPIDFLEAKGYKEVKKDLIIKLPKYSLFELENGRKRMLASAGELQKGNELALPSKYVNFLYLASHYEKLKGSPEDNEQKQLFVEQHKHYLDEIIEQISEFSKRVILADANLDKVLSAYNKHRDKPIREQAENIIHLFTLTNLGAPAAFKYFDTTIDRKRYTSTKEVLDATLIHQSITGLYETRIDLSQLGGD

SEQ ID NO: 36 - protein, 1368 aa, Streptococcus pyogenes
  misc_feature (762)..(762): Xaa can be any naturally occurring amino acid
MDKKYSIGLDIGTNSVGWAVITDEYKVPSKKFKVLGNTDRHSIKKNLIGALLFDSGETAEATRLKRTARRRYTRRKNRICYLQEIFSNEMAKVDDSFFHRLEESFLVEEDKKHERHPIFGNIVDEVAYHEKYPTIYHLRKKLVDSTDKADLRLIYLALAHMIKFRGHFLIEGDLNPDNSDVDKLFIQLVQTYNQLFEENPINASGVDAKAILSARLSKSRRLENLIAQLPGEKKNGLFGNLIALSLGLTPNFKSNFDLAEDAKLQLSKDTYDDDLDNLLAQIGDQYADLFLAAKNLSDAILLSDILRVNTEITKAPLSASMIKRYDEHHQDLTLLKALVRQQLPEKYKEIFFDQSKNGYAGYIDGGASQEEFYKFIKPILEKMDGTEELLVKLNREDLLRKQRTFDNGSIPHQIHLGELHAILRRQEDFYPFLKDNREKIEKILTFRIPYYVGPLARGNSRFAWMTRKSEETITPWNFEEVVDKGASAQSFIERMTNFDKNLPNEKVLPKHSLLYEYFTVYNELTKVKYVTEGMRKPAFLSGEQKKAIVDLLFKTNRKVTVKQLKEDYFKKIECFDSVEISGVEDRFNASLGTYHDLLKIIKDKDFLDNEENEDILEDIVLTLTLFEDREMIEERLKTYAHLFDDKVMKQLKRRRYTGWGRLSRKLINGIRDKQSGKTILDFLKSDGFANRNFMQLIHDDSLTFKEDIQKAQVSGQGDSLHEHIANLAGSPAIKKGILQTVKVVDELVKVMGRHKPENIVIXMARENQTTQKGQKNSRERMKRIEEGIKELGSQILKEHPVENTQLQNEKLYLYYLQNGRDMYVDQELDINRLSDYDVDHIVPQSFLKDDSIDNKVLTRSDKNRGKSDNVPSEEVVKKMKNYWRQLLNAKLITQRKFDNLTKAERGGLSELDKAGFIKRQLVETRQITKHVAQILDSRMNTKYDENDKLIREVKVITLKSKLVSDFRKDFQFYKVREINNYHHAHDAYLNAVVGTALIKKYPKLESEFVYGDYKVYDVRKMIAKSEQEIGKATAKYFFYSNIMNFFKTEITLANGEIRKRPLIETNGETGEIVWDKGRDFATVRKVLSMPQVNIVKKTEVQTGGFSKESILPKRNSDKLIARKKDWDPKKYGGFDSPTVAYSVLVVAKVEKGKSKKLKSVKELLGITIMERSSFEKNPIDFLEAKGYKEVKKDLIIKLPKYSLFELENGRKRMLASAGELQKGNELALPSKYVNFLYLASHYEKLKGSPEDNEQKQLFVEQHKHYLDEIIEQISEFSKRVILADANLDKVLSAYNKHRDKPIREQAENIIHLFTLTNLGAPAAFKYFDTTIDRKRYTSTKEVLDATLIHQSITGLYETRIDLSQLGGD

SEQ ID NO: 37 - protein, 1368 aa, Streptococcus pyogenes
  misc_feature (983)..(983): Xaa can be any naturally occurring amino acid
MDKKYSIGLDIGTNSVGWAVITDEYKVPSKKFKVLGNTDRHSIKKNLIGALLFDSGETAEATRLKRTARRRYTRRKNRICYLQEIFSNEMAKVDDSFFHRLEESFLVEEDKKHERHPIFGNIVDEVAYHEKYPTIYHLRKKLVDSTDKADLRLIYLALAHMIKFRGHFLIEGDLNPDNSDVDKLFIQLVQTYNQLFEENPINASGVDAKAILSARLSKSRRLENLIAQLPGEKKNGLFGNLIALSLGLTPNFKSNFDLAEDAKLQLSKDTYDDDLDNLLAQIGDQYADLFLAAKNLSDAILLSDILRVNTEITKAPLSASMIKRYDEHHQDLTLLKALVRQQLPEKYKEIFFDQSKNGYAGYIDGGASQEEFYKFIKPILEKMDGTEELLVKLNREDLLRKQRTFDNGSIPHQIHLGELHAILRRQEDFYPFLKDNREKIEKILTFRIPYYVGPLARGNSRFAWMTRKSEETITPWNFEEVVDKGASAQSFIERMTNFDKNLPNEKVLPKHSLLYEYFTVYNELTKVKYVTEGMRKPAFLSGEQKKAIVDLLFKTNRKVTVKQLKEDYFKKIECFDSVEISGVEDRFNASLGTYHDLLKIIKDKDFLDNEENEDILEDIVLTLTLFEDREMIEERLKTYAHLFDDKVMKQLKRRRYTGWGRLSRKLINGIRDKQSGKTILDFLKSDGFANRNFMQLIHDDSLTFKEDIQKAQVSGQGDSLHEHIANLAGSPAIKKGILQTVKVVDELVKVMGRHKPENIVIEMARENQTTQKGQKNSRERMKRIEEGIKELGSQILKEHPVENTQLQNEKLYLYYLQNGRDMYVDQELDINRLSDYDVDHIVPQSFLKDDSIDNKVLTRSDKNRGKSDNVPSEEVVKKMKNYWRQLLNAKLITQRKFDNLTKAERGGLSELDKAGFIKRQLVETRQITKHVAQILDSRMNTKYDENDKLIREVKVITLKSKLVSDFRKDFQFYKVREINNYHXAHDAYLNAVVGTALIKKYPKLESEFVYGDYKVYDVRKMIAKSEQEIGKATAKYFFYSNIMNFFKTEITLANGEIRKRPLIETNGETGEIVWDKGRDFATVRKVLSMPQVNIVKKTEVQTGGFSKESILPKRNSDKLIARKKDWDPKKYGGFDSPTVAYSVLVVAKVEKGKSKKLKSVKELLGITIMERSSFEKNPIDFLEAKGYKEVKKDLIIKLPKYSLFELENGRKRMLASAGELQKGNELALPSKYVNFLYLASHYEKLKGSPEDNEQKQLFVEQHKHYLDEIIEQISEFSKRVILADANLDKVLSAYNKHRDKPIREQAENIIHLFTLTNLGAPAAFKYFDTTIDRKRYTSTKEVLDATLIHQSITGLYETRIDLSQLGGD

SEQ ID NO: 38 - protein, 1368 aa, Streptococcus pyogenes
  misc_feature (986)..(986): Xaa can be any naturally occurring amino acid
MDKKYSIGLDIGTNSVGWAVITDEYKVPSKKFKVLGNTDRHSIKKNLIGALLFDSGETAEATRLKRTARRRYTRRKNRICYLQEIFSNEMAKVDDSFFHRLEESFLVEEDKKHERHPIFGNIVDEVAYHEKYPTIYHLRKKLVDSTDKADLRLIYLALAHMIKFRGHFLIEGDLNPDNSDVDKLFIQLVQTYNQLFEENPINASGVDAKAILSARLSKSRRLENLIAQLPGEKKNGLFGNLIALSLGLTPNFKSNFDLAEDAKLQLSKDTYDDDLDNLLAQIGDQYADLFLAAKNLSDAILLSDILRVNTEITKAPLSASMIKRYDEHHQDLTLLKALVRQQLPEKYKEIFFDQSKNGYAGYIDGGASQEEFYKFIKPILEKMDGTEELLVKLNREDLLRKQRTFDNGSIPHQIHLGELHAILRRQEDFYPFLKDNREKIEKILTFRIPYYVGPLARGNSRFAWMTRKSEETITPWNFEEVVDKGASAQSFIERMTNFDKNLPNEKVLPKHSLLYEYFTVYNELTKVKYVTEGMRKPAFLSGEQKKAIVDLLFKTNRKVTVKQLKEDYFKKIECFDSVEISGVEDRFNASLGTYHDLLKIIKDKDFLDNEENEDILEDIVLTLTLFEDREMIEERLKTYAHLFDDKVMKQLKRRRYTGWGRLSRKLINGIRDKQSGKTILDFLKSDGFANRNFMQLIHDDSLTFKEDIQKAQVSGQGDSLHEHIANLAGSPAIKKGILQTVKVVDELVKVMGRHKPENIVIEMARENQTTQKGQKNSRERMKRIEEGIKELGSQILKEHPVENTQLQNEKLYLYYLQNGRDMYVDQELDINRLSDYDVDHIVPQSFLKDDSIDNKVLTRSDKNRGKSDNVPSEEVVKKMKNYWRQLLNAKLITQRKFDNLTKAERGGLSELDKAGFIKRQLVETRQITKHVAQILDSRMNTKYDENDKLIREVKVITLKSKLVSDFRKDFQFYKVREINNYHHAHXAYLNAVVGTALIKKYPKLESEFVYGDYKVYDVRKMIAKSEQEIGKATAKYFFYSNIMNFFKTEITLANGEIRKRPLIETNGETGEIVWDKGRDFATVRKVLSMPQVNIVKKTEVQTGGFSKESILPKRNSDKLIARKKDWDPKKYGGFDSPTVAYSVLVVAKVEKGKSKKLKSVKELLGITIMERSSFEKNPIDFLEAKGYKEVKKDLIIKLPKYSLFELENGRKRMLASAGELQKGNELALPSKYVNFLYLASHYEKLKGSPEDNEQKQLFVEQHKHYLDEIIEQISEFSKRVILADANLDKVLSAYNKHRDKPIREQAENIIHLFTLTNLGAPAAFKYFDTTIDRKRYTSTKEVLDATLIHQSITGLYETRIDLSQLGGD

SEQ ID NO: 39 - protein, 1368 aa, Streptococcus pyogenes
MDKKYSIGLAIGTNSVGWAVITDEYKVPSKKFKVLGNTDRHSIKKNLIGALLFDSGETAEATRLKRTARRRYTRRKNRICYLQEIFSNEMAKVDDSFFHRLEESFLVEEDKKHERHPIFGNIVDEVAYHEKYPTIYHLRKKLVDSTDKADLRLIYLALAHMIKFRGHFLIEGDLNPDNSDVDKLFIQLVQTYNQLFEENPINASGVDAKAILSARLSKSRRLENLIAQLPGEKKNGLFGNLIALSLGLTPNFKSNFDLAEDAKLQLSKDTYDDDLDNLLAQIGDQYADLFLAAKNLSDAILLSDILRVNTEITKAPLSASMIKRYDEHHQDLTLLKALVRQQLPEKYKEIFFDQSKNGYAGYIDGGASQEEFYKFIKPILEKMDGTEELLVKLNREDLLRKQRTFDNGSIPHQIHLGELHAILRRQEDFYPFLKDNREKIEKILTFRIPYYVGPLARGNSRFAWMTRKSEETITPWNFEEVVDKGASAQSFIERMTNFDKNLPNEKVLPKHSLLYEYFTVYNELTKVKYVTEGMRKPAFLSGEQKKAIVDLLFKTNRKVTVKQLKEDYFKKIECFDSVEISGVEDRFNASLGTYHDLLKIIKDKDFLDNEENEDILEDIVLTLTLFEDREMIEERLKTYAHLFDDKVMKQLKRRRYTGWGRLSRKLINGIRDKQSGKTILDFLKSDGFANRNFMQLIHDDSLTFKEDIQKAQVSGQGDSLHEHIANLAGSPAIKKGILQTVKVVDELVKVMGRHKPENIVIEMARENQTTQKGQKNSRERMKRIEEGIKELGSQILKEHPVENTQLQNEKLYLYYLQNGRDMYVDQELDINRLSDYDVDHIVPQSFLKDDSIDNKVLTRSDKNRGKSDNVPSEEVVKKMKNYWRQLLNAKLITQRKFDNLTKAERGGLSELDKAGFIKRQLVETRQITKHVAQILDSRMNTKYDENDKLIREVKVITLKSKLVSDFRKDFQFYKVREINNYHHAHDAYLNAVVGTALIKKYPKLESEFVYGDYKVYDVRKMIAKSEQEIGKATAKYFFYSNIMNFFKTEITLANGEIRKRPLIETNGETGEIVWDKGRDFATVRKVLSMPQVNIVKKTEVQTGGFSKESILPKRNSDKLIARKKDWDPKKYGGFDSPTVAYSVLVVAKVEKGKSKKLKSVKELLGITIMERSSFEKNPIDFLEAKGYKEVKKDLIIKLPKYSLFELENGRKRMLASAGELQKGNELALPSKYVNFLYLASHYEKLKGSPEDNEQKQLFVEQHKHYLDEIIEQISEFSKRVILADANLDKVLSAYNKHRDKPIREQAENIIHLFTLTNLGAPAAFKYFDTTIDRKRYTSTKEVLDATLIHQSITGLYETRIDLSQLGGD

SEQ ID NO: 40 - protein, 1368 aa, Streptococcus pyogenes
MDKKYSIGLDIGTNSVGWAVITDEYKVPSKKFKVLGNTDRHSIKKNLIGALLFDSGETAEATRLKRTARRRYTRRKNRICYLQEIFSNEMAKVDDSFFHRLEESFLVEEDKKHERHPIFGNIVDEVAYHEKYPTIYHLRKKLVDSTDKADLRLIYLALAHMIKFRGHFLIEGDLNPDNSDVDKLFIQLVQTYNQLFEENPINASGVDAKAILSARLSKSRRLENLIAQLPGEKKNGLFGNLIALSLGLTPNFKSNFDLAEDAKLQLSKDTYDDDLDNLLAQIGDQYADLFLAAKNLSDAILLSDILRVNTEITKAPLSASMIKRYDEHHQDLTLLKALVRQQLPEKYKEIFFDQSKNGYAGYIDGGASQEEFYKFIKPILEKMDGTEELLVKLNREDLLRKQRTFDNGSIPHQIHLGELHAILRRQEDFYPFLKDNREKIEKILTFRIPYYVGPLARGNSRFAWMTRKSEETITPWNFEEVVDKGASAQSFIERMTNFDKNLPNEKVLPKHSLLYEYFTVYNELTKVKYVTEGMRKPAFLSGEQKKAIVDLLFKTNRKVTVKQLKEDYFKKIECFDSVEISGVEDRFNASLGTYHDLLKIIKDKDFLDNEENEDILEDIVLTLTLFEDREMIEERLKTYAHLFDDKVMKQLKRRRYTGWGRLSRKLINGIRDKQSGKTILDFLKSDGFANRNFMQLIHDDSLTFKEDIQKAQVSGQGDSLHEHIANLAGSPAIKKGILQTVKVVDELVKVMGRHKPENIVIAMARENQTTQKGQKNSRERMKRIEEGIKELGSQILKEHPVENTQLQNEKLYLYYLQNGRDMYVDQELDINRLSDYDVDHIVPQSFLKDDSIDNKVLTRSDKNRGKSDNVPSEEVVKKMKNYWRQLLNAKLITQRKFDNLTKAERGGLSELDKAGFIKRQLVETRQITKHVAQILDSRMNTKYDENDKLIREVKVITLKSKLVSDFRKDFQFYKVREINNYHHAHDAYLNAVVGTALIKKYPKLESEFVYGDYKVYDVRKMIAKSEQEIGKATAKYFFYSNIMNFFKTEITLANGEIRKRPLIETNGETGEIVWDKGRDFATVRKVLSMPQVNIVKKTEVQTGGFSKESILPKRNSDKLIARKKDWDPKKYGGFDSPTVAYSVLVVAKVEKGKSKKLKSVKELLGITIMERSSFEKNPIDFLEAKGYKEVKKDLIIKLPKYSLFELENGRKRMLASAGELQKGNELALPSKYVNFLYLASHYEKLKGSPEDNEQKQLFVEQHKHYLDEIIEQISEFSKRVILADANLDKVLSAYNKHRDKPIREQAENIIHLFTLTNLGAPAAFKYFDTTIDRKRYTSTKEVLDATLIHQSITGLYETRIDLSQLGGD

SEQ ID NO: 41 - protein, 1368 aa, Streptococcus pyogenes
MDKKYSIGLDIGTNSVGWAVITDEYKVPSKKFKVLGNTDRHSIKKNLIGALLFDSGETAEATRLKRTARRRYTRRKNRICYLQEIFSNEMAKVDDSFFHRLEESFLVEEDKKHERHPIFGNIVDEVAYHEKYPTIYHLRKKLVDSTDKADLRLIYLALAHMIKFRGHFLIEGDLNPDNSDVDKLFIQLVQTYNQLFEENPINASGVDAKAILSARLSKSRRLENLIAQLPGEKKNGLFGNLIALSLGLTPNFKSNFDLAEDAKLQLSKDTYDDDLDNLLAQIGDQYADLFLAAKNLSDAILLSDILRVNTEITKAPLSASMIKRYDEHHQDLTLLKALVRQQLPEKYKEIFFDQSKNGYAGYIDGGASQEEFYKFIKPILEKMDGTEELLVKLNREDLLRKQRTFDNGSIPHQIHLGELHAILRRQEDFYPFLKDNREKIEKILTFRIPYYVGPLARGNSRFAWMTRKSEETITPWNFEEVVDKGASAQSFIERMTNFDKNLPNEKVLPKHSLLYEYFTVYNELTKVKYVTEGMRKPAFLSGEQKKAIVDLLFKTNRKVTVKQLKEDYFKKIECFDSVEISGVEDRFNASLGTYHDLLKIIKDKDFLDNEENEDILEDIVLTLTLFEDREMIEERLKTYAHLFDDKVMKQLKRRRYTGWGRLSRKLINGIRDKQSGKTILDFLKSDGFANRNFMQLIHDDSLTFKEDIQKAQVSGQGDSLHEHIANLAGSPAIKKGILQTVKVVDELVKVMGRHKPENIVIEMARENQTTQKGQKNSRERMKRIEEGIKELGSQILKEHPVENTQLQNEKLYLYYLQNGRDMYVDQELDINRLSDYDVDHIVPQSFLKDDSIDNKVLTRSDKNRGKSDNVPSEEVVKKMKNYWRQLLNAKLITQRKFDNLTKAERGGLSELDKAGFIKRQLVETRQITKHVAQILDSRMNTKYDENDKLIREVKVITLKSKLVSDFRKDFQFYKVREINNYHAAHDAYLNAVVGTALIKKYPKLESEFVYGDYKVYDVRKMIAKSEQEIGKATAKYFFYSNIMNFFKTEITLANGEIRKRPLIETNGETGEIVWDKGRDFATVRKVLSMPQVNIVKKTEVQTGGFSKESILPKRNSDKLIARKKDWDPKKYGGFDSPTVAYSVLVVAKVEKGKSKKLKSVKELLGITIMERSSFEKNPIDFLEAKGYKEVKKDLIIKLPKYSLFELENGRKRMLASAGELQKGNELALPSKYVNFLYLASHYEKLKGSPEDNEQKQLFVEQHKHYLDEIIEQISEFSKRVILADANLDKVLSAYNKHRDKPIREQAENIIHLFTLTNLGAPAAFKYFDTTIDRKRYTSTKEVLDATLIHQSITGLYETRIDLSQLGGD

SEQ ID NO: 42 - protein, 1368 aa, Streptococcus pyogenes
MDKKYSIGLDIGTNSVGWAVITDEYKVPSKKFKVLGNTDRHSIKKNLIGALLFDSGETAEATRLKRTARRRYTRRKNRICYLQEIFSNEMAKVDDSFFHRLEESFLVEEDKKHERHPIFGNIVDEVAYHEKYPTIYHLRKKLVDSTDKADLRLIYLALAHMIKFRGHFLIEGDLNPDNSDVDKLFIQLVQTYNQLFEENPINASGVDAKAILSARLSKSRRLENLIAQLPGEKKNGLFGNLIALSLGLTPNFKSNFDLAEDAKLQLSKDTYDDDLDNLLAQIGDQYADLFLAAKNLSDAILLSDILRVNTEITKAPLSASMIKRYDEHHQDLTLLKALVRQQLPEKYKEIFFDQSKNGYAGYIDGGASQEEFYKFIKPILEKMDGTEELLVKLNREDLLRKQRTFDNGSIPHQIHLGELHAILRRQEDFYPFLKDNREKIEKILTFRIPYYVGPLARGNSRFAWMTRKSEETITPWNFEEVVDKGASAQSFIERMTNFDKNLPNEKVLPKHSLLYEYFTVYNELTKVKYVTEGMRKPAFLSGEQKKAIVDLLFKTNRKVTVKQLKEDYFKKIECFDSVEISGVEDRFNASLGTYHDLLKIIKDKDFLDNEENEDILEDIVLTLTLFEDREMIEERLKTYAHLFDDKVMKQLKRRRYTGWGRLSRKLINGIRDKQSGKTILDFLKSDGFANRNFMQLIHDDSLTFKEDIQKAQVSGQGDSLHEHIANLAGSPAIKKGILQTVKVVDELVKVMGRHKPENIVIEMARENQTTQKGQKNSRERMKRIEEGIKELGSQILKEHPVENTQLQNEKLYLYYLQNGRDMYVDQELDINRLSDYDVDHIVPQSFLKDDSIDNKVLTRSDKNRGKSDNVPSEEVVKKMKNYWRQLLNAKLITQRKFDNLTKAERGGLSELDKAGFIKRQLVETRQITKHVAQILDSRMNTKYDENDKLIREVKVITLKSKLVSDFRKDFQFYKVREINNYHHAHAAYLNAVVGTALIKKYPKLESEFVYGDYKVYDVRKMIAKSEQEIGKATAKYFFYSNIMNFFKTEITLANGEIRKRPLIETNGETGEIVWDKGRDFATVRKVLSMPQVNIVKKTEVQTGGFSKESILPKRNSDKLIARKKDWDPKKYGGFDSPTVAYSVLVVAKVEKGKSKKLKSVKELLGITIMERSSFEKNPIDFLEAKGYKEVKKDLIIKLPKYSLFELENGRKRMLASAGELQKGNELALPSKYVNFLYLASHYEKLKGSPEDNEQKQLFVEQHKHYLDEIIEQISEFSKRVILADANLDKVLSAYNKHRDKPIREQAENIIHLFTLTNLGAPAAFKYFDTTIDRKRYTSTKEVLDATLIHQSITGLYETRIDLSQLGGD

SEQ ID NO: 43 - protein, 1368 aa, Streptococcus pyogenes
  misc_feature (840)..(840): Xaa can be any naturally occurring amino acid
MDKKYSIGLDIGTNSVGWAVITDEYKVPSKKFKVLGNTDRHSIKKNLIGALLFDSGETAEATRLKRTARRRYTRRKNRICYLQEIFSNEMAKVDDSFFHRLEESFLVEEDKKHERHPIFGNIVDEVAYHEKYPTIYHLRKKLVDSTDKADLRLIYLALAHMIKFRGHFLIEGDLNPDNSDVDKLFIQLVQTYNQLFEENPINASGVDAKAILSARLSKSRRLENLIAQLPGEKKNGLFGNLIALSLGLTPNFKSNFDLAEDAKLQLSKDTYDDDLDNLLAQIGDQYADLFLAAKNLSDAILLSDILRVNTEITKAPLSASMIKRYDEHHQDLTLLKALVRQQLPEKYKEIFFDQSKNGYAGYIDGGASQEEFYKFIKPILEKMDGTEELLVKLNREDLLRKQRTFDNGSIPHQIHLGELHAILRRQEDFYPFLKDNREKIEKILTFRIPYYVGPLARGNSRFAWMTRKSEETITPWNFEEVVDKGASAQSFIERMTNFDKNLPNEKVLPKHSLLYEYFTVYNELTKVKYVTEGMRKPAFLSGEQKKAIVDLLFKTNRKVTVKQLKEDYFKKIECFDSVEISGVEDRFNASLGTYHDLLKIIKDKDFLDNEENEDILEDIVLTLTLFEDREMIEERLKTYAHLFDDKVMKQLKRRRYTGWGRLSRKLINGIRDKQSGKTILDFLKSDGFANRNFMQLIHDDSLTFKEDIQKAQVSGQGDSLHEHIANLAGSPAIKKGILQTVKVVDELVKVMGRHKPENIVIEMARENQTTQKGQKNSRERMKRIEEGIKELGSQILKEHPVENTQLQNEKLYLYYLQNGRDMYVDQELDINRLSDYDVDXIVPQSFLKDDSIDNKVLTRSDKNRGKSDNVPSEEVVKKMKNYWRQLLNAKLITQRKFDNLTKAERGGLSELDKAGFIKRQLVETRQITKHVAQILDSRMNTKYDENDKLIREVKVITLKSKLVSDFRKDFQFYKVREINNYHHAHDAYLNAVVGTALIKKYPKLESEFVYGDYKVYDVRKMIAKSEQEIGKATAKYFFYSNIMNFFKTEITLANGEIRKRPLIETNGETGEIVWDKGRDFATVRKVLSMPQVNIVKKTEVQTGGFSKESILPKRNSDKLIARKKDWDPKKYGGFDSPTVAYSVLVVAKVEKGKSKKLKSVKELLGITIMERSSFEKNPIDFLEAKGYKEVKKDLIIKLPKYSLFELENGRKRMLASAGELQKGNELALPSKYVNFLYLASHYEKLKGSPEDNEQKQLFVEQHKHYLDEIIEQISEFSKRVILADANLDKVLSAYNKHRDKPIREQAENIIHLFTLTNLGAPAAFKYFDTTIDRKRYTSTKEVLDATLIHQSITGLYETRIDLSQLGGD

SEQ ID NO: 44 - protein, 1368 aa, Streptococcus pyogenes
MDKKYSIGLDIGTNSVGWAVITDEYKVPSKKFKVLGNTDRHSIKKNLIGALLFDSGETAEATRLKRTARRRYTRRKNRICYLQEIFSNEMAKVDDSFFHRLEESFLVEEDKKHERHPIFGNIVDEVAYHEKYPTIYHLRKKLVDSTDKADLRLIYLALAHMIKFRGHFLIEGDLNPDNSDVDKLFIQLVQTYNQLFEENPINASGVDAKAILSARLSKSRRLENLIAQLPGEKKNGLFGNLIALSLGLTPNFKSNFDLAEDAKLQLSKDTYDDDLDNLLAQIGDQYADLFLAAKNLSDAILLSDILRVNTEITKAPLSASMIKRYDEHHQDLTLLKALVRQQLPEKYKEIFFDQSKNGYAGYIDGGASQEEFYKFIKPILEKMDGTEELLVKLNREDLLRKQRTFDNGSIPHQIHLGELHAILRRQEDFYPFLKDNREKIEKILTFRIPYYVGPLARGNSRFAWMTRKSEETITPWNFEEVVDKGASAQSFIERMTNFDKNLPNEKVLPKHSLLYEYFTVYNELTKVKYVTEGMRKPAFLSGEQKKAIVDLLFKTNRKVTVKQLKEDYFKKIECFDSVEISGVEDRFNASLGTYHDLLKIIKDKDFLDNEENEDILEDIVLTLTLFEDREMIEERLKTYAHLFDDKVMKQLKRRRYTGWGRLSRKLINGIRDKQSGKTILDFLKSDGFANRNFMQLIHDDSLTFKEDIQKAQVSGQGDSLHEHIANLAGSPAIKKGILQTVKVVDELVKVMGRHKPENIVIEMARENQTTQKGQKNSRERMKRIEEGIKELGSQILKEHPVENTQLQNEKLYLYYLQNGRDMYVDQELDINRLSDYDVDAIVPQSFLKDDSIDNKVLTRSDKNRGKSDNVPSEEVVKKMKNYWRQLLNAKLITQRKFDNLTKAERGGLSELDKAGFIKRQLVETRQITKHVAQILDSRMNTKYDENDKLIREVKVITLKSKLVSDFRKDFQFYKVREINNYHHAHDAYLNAVVGTALIKKYPKLESEFVYGDYKVYDVRKMIAKSEQEIGKATAKYFFYSNIMNFFKTEITLANGEIRKRPLIETNGETGEIVWDKGRDFATVRKVLSMPQVNIVKKTEVQTGGFSKESILPKRNSDKLIARKKDWDPKKYGGFDSPTVAYSVLVVAKVEKGKSKKLKSVKELLGITIMERSSFEKNPIDFLEAKGYKEVKKDLIIKLPKYSLFELENGRKRMLASAGELQKGNELALPSKYVNFLYLASHYEKLKGSPEDNEQKQLFVEQHKHYLDEIIEQISEFSKRVILADANLDKVLSAYNKHRDKPIREQAENIIHLFTLTNLGAPAAFKYFDTTIDRKRYTSTKEVLDATLIHQSITGLYETRIDLSQLGGD

SEQ ID NO: 45 - protein, 1368 aa, Streptococcus pyogenes
  misc_feature (864)..(864): Xaa can be any naturally occurring amino acid
MDKKYSIGLDIGTNSVGWAVITDEYKVPSKKFKVLGNTDRHSIKKNLIGALLFDSGETAEATRLKRTARRRYTRRKNRICYLQEIFSNEMAKVDDSFFHRLEESFLVEEDKKHERHPIFGNIVDEVAYHEKYPTIYHLRKKLVDSTDKADLRLIYLALAHMIKFRGHFLIEGDLNPDNSDVDKLFIQLVQTYNQLFEENPINASGVDAKAILSARLSKSRRLENLIAQLPGEKKNGLFGNLIALSLGLTPNFKSNFDLAEDAKLQLSKDTYDDDLDNLLAQIGDQYADLFLAAKNLSDAILLSDILRVNTEITKAPLSASMIKRYDEHHQDLTLLKALVRQQLPEKYKEIFFDQSKNGYAGYIDGGASQEEFYKFIKPILEKMDGTEELLVKLNREDLLRKQRTFDNGSIPHQIHLGELHAILRRQEDFYPFLKDNREKIEKILTFRIPYYVGPLARGNSRFAWMTRKSEETITPWNFEEVVDKGASAQSFIERMTNFDKNLPNEKVLPKHSLLYEYFTVYNELTKVKYVTEGMRKPAFLSGEQKKAIVDLLFKTNRKVTVKQLKEDYFKKIECFDSVEISGVEDRFNASLGTYHDLLKIIKDKDFLDNEENEDILEDIVLTLTLFEDREMIEERLKTYAHLFDDKVMKQLKRRRYTGWGRLSRKLINGIRDKQSGKTILDFLKSDGFANRNFMQLIHDDSLTFKEDIQKAQVSGQGDSLHEHIANLAGSPAIKKGILQTVKVVDELVKVMGRHKPENIVIEMARENQTTQKGQKNSRERMKRIEEGIKELGSQILKEHPVENTQLQNEKLYLYYLQNGRDMYVDQELDINRLSDYDVDHIVPQSFLKDDSIDNKVLTRSDKNXGKSDNVPSEEVVKKMKNYWRQLLNAKLITQRKFDNLTKAERGGLSELDKAGFIKRQLVETRQITKHVAQILDSRMNTKYDENDKLIREVKVITLKSKLVSDFRKDFQFYKVREINNYHHAHDAYLNAVVGTALIKKYPKLESEFVYGDYKVYDVRKMIAKSEQEIGKATAKYFFYSNIMNFFKTEITLANGEIRKRPLIETNGETGEIVWDKGRDFATVRKVLSMPQVNIVKKTEVQTGGFSKESILPKRNSDKLIARKKDWDPKKYGGFDSPTVAYSVLVVAKVEKGKSKKLKSVKELLGITIMERSSFEKNPIDFLEAKGYKEVKKDLIIKLPKYSLFELENGRKRMLASAGELQKGNELALPSKYVNFLYLASHYEKLKGSPEDNEQKQLFVEQHKHYLDEIIEQISEFSKRVILADANLDKVLSAYNKHRDKPIREQAENIIHLFTLTNLGAPAAFKYFDTTIDRKRYTSTKEVLDATLIHQSITGLYETRIDLSQLGGD

SEQ ID NO: 46 - protein, 1368 aa, Streptococcus pyogenes
MDKKYSIGLDIGTNSVGWAVITDEYKVPSKKFKVLGNTDRHSIKKNLIGALLFDSGETAEATRLKRTARRRYTRRKNRICYLQEIFSNEMAKVDDSFFHRLEESFLVEEDKKHERHPIFGNIVDEVAYHEKYPTIYHLRKKLVDSTDKADLRLIYLALAHMIKFRGHFLIEGDLNPDNSDVDKLFIQLVQTYNQLFEENPINASGVDAKAILSARLSKSRRLENLIAQLPGEKKNGLFGNLIALSLGLTPNFKSNFDLAEDAKLQLSKDTYDDDLDNLLAQIGDQYADLFLAAKNLSDAILLSDILRVNTEITKAPLSASMIKRYDEHHQDLTLLKALVRQQLPEKYKEIFFDQSKNGYAGYIDGGASQEEFYKFIKPILEKMDGTEELLVKLNREDLLRKQRTFDNGSIPHQIHLGELHAILRRQEDFYPFLKDNREKIEKILTFRIPYYVGPLARGNSRFAWMTRKSEETITPWNFEEVVDKGASAQSFIERMTNFDKNLPNEKVLPKHSLLYEYFTVYNELTKVKYVTEGMRKPAFLSGEQKKAIVDLLFKTNRKVTVKQLKEDYFKKIECFDSVEISGVEDRFNASLGTYHDLLKIIKDKDFLDNEENEDILEDIVLTLTLFEDREMIEERLKTYAHLFDDKVMKQLKRRRYTGWGRLSRKLINGIRDKQSGKTILDFLKSDGFANRNFMQLIHDDSLTFKEDIQKAQVSGQGDSLHEHIANLAGSPAIKKGILQTVKVVDELVKVMGRHKPENIVIEMARENQTTQKGQKNSRERMKRIEEGIKELGSQILKEHPVENTQLQNEKLYLYYLQNGRDMYVDQELDINRLSDYDVDHIVPQSFLKDDSIDNKVLTRSDKNAGKSDNVPSEEVVKKMKNYWRQLLNAKLITQRKFDNLTKAERGGLSELDKAGFIKRQLVETRQITKHVAQILDSRMNTKYDENDKLIREVKVITLKSKLVSDFRKDFQFYKVREINNYHHAHDAYLNAVVGTALIKKYPKLESEFVYGDYKVYDVRKMIAKSEQEIGKATAKYFFYSNIMNFFKTEITLANGEIRKRPLIETNGETGEIVWDKGRDFATVRKVLSMPQVNIVKKTEVQTGGFSKESILPKRNSDKLIARKKDWDPKKYGGFDSPTVAYSVLVVAKVEKGKSKKLKSVKELLGITIMERSSFEKNPIDFLEAKGYKEVKKDLIIKLPKYSLFELENGRKRMLASAGELQKGNELALPSKYVNFLYLASHYEKLKGSPEDNEQKQLFVEQHKHYLDEIIEQISEFSKRVILADANLDKVLSAYNKHRDKPIREQAENIIHLFTLTNLGAPAAFKYFDTTIDRKRYTSTKEVLDATLIHQSITGLYETRIDLSQLGGD

SEQ ID NO: 47 - protein, 1367 aa, Streptococcus pyogenes
  misc_feature (839)..(839): Xaa can be any naturally occurring amino acid
DKKYSIGLDIGTNSVGWAVITDEYKVPSKKFKVLGNTDRHSIKKNLIGALLFDSGETAEATRLKRTARRRYTRRKNRICYLQEIFSNEMAKVDDSFFHRLEESFLVEEDKKHERHPIFGNIVDEVAYHEKYPTIYHLRKKLVDSTDKADLRLIYLALAHMIKFRGHFLIEGDLNPDNSDVDKLFIQLVQTYNQLFEENPINASGVDAKAILSARLSKSRRLENLIAQLPGEKKNGLFGNLIALSLGLTPNFKSNFDLAEDAKLQLSKDTYDDDLDNLLAQIGDQYADLFLAAKNLSDAILLSDILRVNTEITKAPLSASMIKRYDEHHQDLTLLKALVRQQLPEKYKEIFFDQSKNGYAGYIDGGASQEEFYKFIKPILEKMDGTEELLVKLNREDLLRKQRTFDNGSIPHQIHLGELHAILRRQEDFYPFLKDNREKIEKILTFRIPYYVGPLARGNSRFAWMTRKSEETITPWNFEEVVDKGASAQSFIERMTNFDKNLPNEKVLPKHSLLYEYFTVYNELTKVKYVTEGMRKPAFLSGEQKKAIVDLLFKTNRKVTVKQLKEDYFKKIECFDSVEISGVEDRFNASLGTYHDLLKIIKDKDFLDNEENEDILEDIVLTLTLFEDREMIEERLKTYAHLFDDKVMKQLKRRRYTGWGRLSRKLINGIRDKQSGKTILDFLKSDGFANRNFMQLIHDDSLTFKEDIQKAQVSGQGDSLHEHIANLAGSPAIKKGILQTVKVVDELVKVMGRHKPENIVIEMARENQTTQKGQKNSRERMKRIEEGIKELGSQILKEHPVENTQLQNEKLYLYYLQNGRDMYVDQELDINRLSDYDVDXIVPQSFLKDDSIDNKVLTRSDKNRGKSDNVPSEEVVKKMKNYWRQLLNAKLITQRKFDNLTKAERGGLSELDKAGFIKRQLVETRQITKHVAQILDSRMNTKYDENDKLIREVKVITLKSKLVSDFRKDFQFYKVREINNYHHAHDAYLNAVVGTALIKKYPKLESEFVYGDYKVYDVRKMIAKSEQEIGKATAKYFFYSNIMNFFKTEITLANGEIRKRPLIETNGETGEIVWDKGRDFATVRKVLSMPQVNIVKKTEVQTGGFSKESILPKRNSDKLIARKKDWDPKKYGGFDSPTVAYSVLVVAKVEKGKSKKLKSVKELLGITIMERSSFEKNPIDFLEAKGYKEVKKDLIIKLPKYSLFELENGRKRMLASAGELQKGNELALPSKYVNFLYLASHYEKLKGSPEDNEQKQLFVEQHKHYLDEIIEQISEFSKRVILADANLDKVLSAYNKHRDKPIREQAENIIHLFTLTNLGAPAAFKYFDTTIDRKRYTSTKEVLDATLIHQSITGLYETRIDLSQLGGD

SEQ ID NO: 48 - protein, 1367 aa, Streptococcus pyogenes
DKKYSIGLDIGTNSVGWAVITDEYKVPSKKFKVLGNTDRHSIKKNLIGALLFDSGETAEATRLKRTARRRYTRRKNRICYLQEIFSNEMAKVDDSFFHRLEESFLVEEDKKHERHPIFGNIVDEVAYHEKYPTIYHLRKKLVDSTDKADLRLIYLALAHMIKFRGHFLIEGDLNPDNSDVDKLFIQLVQTYNQLFEENPINASGVDAKAILSARLSKSRRLENLIAQLPGEKKNGLFGNLIALSLGLTPNFKSNFDLAEDAKLQLSKDTYDDDLDNLLAQIGDQYADLFLAAKNLSDAILLSDILRVNTEITKAPLSASMIKRYDEHHQDLTLLKALVRQQLPEKYKEIFFDQSKNGYAGYIDGGASQEEFYKFIKPILEKMDGTEELLVKLNREDLLRKQRTFDNGSIPHQIHLGELHAILRRQEDFYPFLKDNREKIEKILTFRIPYYVGPLARGNSRFAWMTRKSEETITPWNFEEVVDKGASAQSFIERMTNFDKNLPNEKVLPKHSLLYEYFTVYNELTKVKYVTEGMRKPAFLSGEQKKAIVDLLFKTNRKVTVKQLKEDYFKKIECFDSVEISGVEDRFNASLGTYHDLLKIIKDKDFLDNEENEDILEDIVLTLTLFEDREMIEERLKTYAHLFDDKVMKQLKRRRYTGWGRLSRKLINGIRDKQSGKTILDFLKSDGFANRNFMQLIHDDSLTFKEDIQKAQVSGQGDSLHEHIANLAGSPAIKKGILQTVKVVDELVKVMGRHKPENIVIEMARENQTTQKGQKNSRERMKRIEEGIKELGSQILKEHPVENTQLQNEKLYLYYLQNGRDMYVDQELDINRLSDYDVDAIVPQSFLKDDSIDNKVLTRSDKNRGKSDNVPSEEVVKKMKNYWRQLLNAKLITQRKFDNLTKAERGGLSELDKAGFIKRQLVETRQITKHVAQILDSRMNTKYDENDKLIREVKVITLKSKLVSDFRKDFQFYKVREINNYHHAHDAYLNAVVGTALIKKYPKLESEFVYGDYKVYDVRKMIAKSEQEIGKATAKYFFYSNIMNFFKTEITLANGEIRKRPLIETNGETGEIVWDKGRDFATVRKVLSMPQVNIVKKTEVQTGGFSKESILPKRNSDKLIARKKDWDPKKYGGFDSPTVAYSVLVVAKVEKGKSKKLKSVKELLGITIMERSSFEKNPIDFLEAKGYKEVKKDLIIKLPKYSLFELENGRKRMLASAGELQKGNELALPSKYVNFLYLASHYEKLKGSPEDNEQKQLFVEQHKHYLDEIIEQISEFSKRVILADANLDKVLSAYNKHRDKPIREQAENIIHLFTLTNLGAPAAFKYFDTTIDRKRYTSTKEVLDATLIHQSITGLYETRIDLSQLGGD

SEQ ID NO: 49 - protein, 1367 aa, Streptococcus pyogenes
  misc_feature (863)..(863): Xaa can be any naturally occurring amino acid
DKKYSIGLDIGTNSVGWAVITDEYKVPSKKFKVLGNTDRHSIKKNLIGALLFDSGETAEATRLKRTARRRYTRRKNRICYLQEIFSNEMAKVDDSFFHRLEESFLVEEDKKHERHPIFGNIVDEVAYHEKYPTIYHLRKKLVDSTDKADLRLIYLALAHMIKFRGHFLIEGDLNPDNSDVDKLFIQLVQTYNQLFEENPINASGVDAKAILSARLSKSRRLENLIAQLPGEKKNGLFGNLIALSLGLTPNFKSNFDLAEDAKLQLSKDTYDDDLDNLLAQIGDQYADLFLAAKNLSDAILLSDILRVNTEITKAPLSASMIKRYDEHHQDLTLLKALVRQQLPEKYKEIFFDQSKNGYAGYIDGGASQEEFYKFIKPILEKMDGTEELLVKLNREDLLRKQRTFDNGSIPHQIHLGELHAILRRQEDFYPFLKDNREKIEKILTFRIPYYVGPLARGNSRFAWMTRKSEETITPWNFEEVVDKGASAQSFIERMTNFDKNLPNEKVLPKHSLLYEYFTVYNELTKVKYVTEGMRKPAFLSGEQKKAIVDLLFKTNRKVTVKQLKEDYFKKIECFDSVEISGVEDRFNASLGTYHDLLKIIKDKDFLDNEENEDILEDIVLTLTLFEDREMIEERLKTYAHLFDDKVMKQLKRRRYTGWGRLSRKLINGIRDKQSGKTILDFLKSDGFANRNFMQLIHDDSLTFKEDIQKAQVSGQGDSLHEHIANLAGSPAIKKGILQTVKVVDELVKVMGRHKPENIVIEMARENQTTQKGQKNSRERMKRIEEGIKELGSQILKEHPVENTQLQNEKLYLYYLQNGRDMYVDQELDINRLSDYDVDHIVPQSFLKDDSIDNKVLTRSDKNXGKSDNVPSEEVVKKMKNYWRQLLNAKLITQRKFDNLTKAERGGLSELDKAGFIKRQLVETRQITKHVAQILDSRMNTKYDENDKLIREVKVITLKSKLVSDFRKDFQFYKVREINNYHHAHDAYLNAVVGTALIKKYPKLESEFVYGDYKVYDVRKMIAKSEQEIGKATAKYFFYSNIMNFFKTEITLANGEIRKRPLIETNGETGEIVWDKGRDFATVRKVLSMPQVNIVKKTEVQTGGFSKESILPKRNSDKLIARKKDWDPKKYGGFDSPTVAYSVLVVAKVEKGKSKKLKSVKELLGITIMERSSFEKNPIDFLEAKGYKEVKKDLIIKLPKYSLFELENGRKRMLASAGELQKGNELALPSKYVNFLYLASHYEKLKGSPEDNEQKQLFVEQHKHYLDEIIEQISEFSKRVILADANLDKVLSAYNKHRDKPIREQAENIIHLFTLTNLGAPAAFKYFDTTIDRKRYTSTKEVLDATLIHQSITGLYETRIDLSQLGGD

SEQ ID NO: 50 - protein, 1367 aa, Streptococcus pyogenes
DKKYSIGLDIGTNSVGWAVITDEYKVPSKKFKVLGNTDRHSIKKNLIGALLFDSGETAEATRLKRTARRRYTRRKNRICYLQEIFSNEMAKVDDSFFHRLEESFLVEEDKKHERHPIFGNIVDEVAYHEKYPTIYHLRKKLVDSTDKADLRLIYLALAHMIKFRGHFLIEGDLNPDNSDVDKLFIQLVQTYNQLFEENPINASGVDAKAILSARLSKSRRLENLIAQLPGEKKNGLFGNLIALSLGLTPNFKSNFDLAEDAKLQLSKDTYDDDLDNLLAQIGDQYADLFLAAKNLSDAILLSDILRVNTEITKAPLSASMIKRYDEHHQDLTLLKALVRQQLPEKYKEIFFDQSKNGYAGYIDGGASQEEFYKFIKPILEKMDGTEELLVKLNREDLLRKQRTFDNGSIPHQIHLGELHAILRRQEDFYPFLKDNREKIEKILTFRIPYYVGPLARGNSRFAWMTRKSEETITPWNFEEVVDKGASAQSFIERMTNFDKNLPNEKVLPKHSLLYEYFTVYNELTKVKYVTEGMRKPAFLSGEQKKAIVDLLFKTNRKVTVKQLKEDYFKKIECFDSVEISGVEDRFNASLGTYHDLLKIIKDKDFLDNEENEDILEDIVLTLTLFEDREMIEERLKTYAHLFDDKVMKQLKRRRYTGWGRLSRKLINGIRDKQSGKTILDFLKSDGFANRNFMQLIHDDSLTFKEDIQKAQVSGQGDSLHEHIANLAGSPAIKKGILQTVKVVDELVKVMGRHKPENIVIEMARENQTTQKGQKNSRERMKRIEEGIKELGSQILKEHPVENTQLQNEKLYLYYLQNGRDMYVDQELDINRLSDYDVDHIVPQSFLKDDSIDNKVLTRSDKNAGKSDNVPSEEVVKKMKNYWRQLLNAKLITQRKFDNLTKAERGGLSELDKAGFIKRQLVETRQITKHVAQILDSRMNTKYDENDKLIREVKVITLKSKLVSDFRKDFQFYKVREINNYHHAHDAYLNAVVGTALIKKYPKLESEFVYGDYKVYDVRKMIAKSEQEIGKATAKYFFYSNIMNFFKTEITLANGEIRKRPLIETNGETGEIVWDKGRDFATVRKVLSMPQVNIVKKTEVQTGGFSKESILPKRNSDKLIARKKDWDPKKYGGFDSPTVAYSVLVVAKVEKGKSKKLKSVKELLGITIMERSSFEKNPIDFLEAKGYKEVKKDLIIKLPKYSLFELENGRKRMLASAGELQKGNELALPSKYVNFLYLASHYEKLKGSPEDNEQKQLFVEQHKHYLDEIIEQISEFSKRVILADANLDKVLSAYNKHRDKPIREQAENIIHLFTLTNLGAPAAFKYFDTTIDRKRYTSTKEVLDATLIHQSITGLYETRIDLSQLGGD

SEQ ID NO: 51 - protein, 1053 aa, Staphylococcus aureus; identical to SEQ ID NO: 21

SEQ ID NO: 52 - protein, 1082 aa, N. meningitidis
MAAFKPNSINYILGLDIGIASVGWAMVEIDEEENPIRLIDLGVRVFERAEVPKTGDSLAMARRLARSVRRLTRRRAHRLLRTRRLLKREGVLQAANFDENGLIKSLPNTPWQLRAAALDRKLTPLEWSAVLLHLIKHRGYLSQRKNEGETADKELGALLKGVAGNAHALQTGDFRTPAELALNKFEKESGHIRNQRSDYSHTFSRKDLQAELILLFEKQKEFGNPHVSGGLKEGIETLLMTQRPALSGDAVQKMLGHCTFEPAEPKAAKNTYTAERFIWLTKLNNLRILEQGSERPLTDTERATLMDEPYRKSKLTYAQARKLLGLEDTAFFKGLRYGKDNAEASTLMEMKAYHAISRALEKEGLKDKKSPLNLSPELQDEIGTAFSLFKTDEDITGRLKDRIQPEILEALLKHISFDKFVQISLKALRRIVPLMEQGKRYDEACAEIYGDHYGKKNTEEKIYLPPIPADEIRNPVVLRALSQARKVINGVVRRYGSPARIHIETAREVGKSFKDRKEIEKRQEENRKDREKAAAKFREYFPNFVGEPKSKDILKLRLYEQQHGKCLYSGKEINLGRLNEKGYVEIDAALPFSRTWDDSFNNKVLVLGSENQNKGNQTPYEYFNGKDNSREWQEFKARVETSRFPRSKKQRILLQKFDEDGFKERNLNDTRYVNRFLCQFVADRMRLTGKGKKRVFASNGQITNLLRGFWGLRKVRAENDRHHALDAVVVACSTVAMQQKITRFVRYKEMNAFDGKTIDKETGEVLHQKTHFPQPWEFFAQEVMIRVFGKPDGKPEFEEADTLEKLRTLLAEKLSSRPEAVHEYVTPLFVSRAPNRKMSGQGHMETVKSAKRLDEGVSVLRVPLTQLKLKDLEKMVNREREPKLYEALKARLEAHKDDPAKAFAEPFYKYDKAGNRTQQVKAVRVEQVQKTGVWVRNHNGIADNATMVRVDVFEKGDKYYLVPIYSWQVAKGILPDRAVVQGKDEEDWQLIDDSFNFKFSLHPNDLVEVITKKARMFGYFASCHRGTGNINIRIHDLDHKIGKNGILEGIGVKTALSFQKYQIDELGKEIRPCRLKKRPPVR

SEQ ID NO: 53 - protein, 984 aa, C. jejuni
MARILAFDIGISSIGWAFSENDELKDCGVRIFTKVENPKTGESLALPRRLARSARKRLARRKARLNHLKHLIANEFKLNYEDYQSFDESLAKAYKGSLISPYELRFRALNELLSKQDFARVILHIAKRRGYDDIKNSDDKEKGAILKAIKQNEEKLANYQSVGEYLYKEYFQKFKENSKEFTNVRNKKESYERCIAQSFLKDELKLIFKKQREFGFSFSKKFEEEVLSVAFYKRALKDFSHLVGNCSFFTDEKRAPKNSPLAFMFVALTRIINLLNNLKNTEGILYTKDDLNALLNEVLKNGTLTYKQTKKLLGLSDDYEFKGEKGTYFIEFKKYKEFIKALGEHNLSQDDLNEIAKDITLIKDEIKLKKALAKYDLNQNQIDSLSKLEFKDHLNISFKALKLVTPLMLEGKKYDEACNELNLKVAINEDKKDFLPAFNETYYKDEVTNPVVLRAIKEYRKVLNALLKKYGKVHKINIELAREVGKNHSQRAKIEKEQNENYKAKKDAELECEKLGLKINSKNILKLRLFKEQKEFCAYSGEKIKISDLQDEKMLEIDHIYPYSRSFDDSYMNKVLVFTKQNQEKLNQTPFEAFGNDSAKWQKIEVLAKNLPTKKQKRILDKNYKDKEQKNFKDRNLNDTRYIARLVLNYTKDYLDFLPLSDDENTKLNDTQKGSKVHVEAKSGMLTSALRHTWGFSAKDRNNHLHHAIDAVIIAYANNSIVKAFSDFKKEQESNSAELYAKKISELDYKNKRKFFEPFSGFRQKVLDKIDEIFVSKPERKKPSGALHEETFRKEEEFYQSYGGKEGVLKALELGKIRKVNGKIVKNGDMFRVDIFKHKKTNKFYAVPIYTMDFALKVLPNKAVARSKKGEIKDWILMDENYEFCFSLYKDSLILIQTKDMQEPEFVYYNAFTSSTVSLIVSKHDNKFETLSKNQKILFKNANEKEVIAKSIGIQNLKVFEKYIVSALGEVTKAEFRQREDFKK

SEQ ID NO: 54 - protein, 1087 aa, G. stearothermophilus
MRYKIGLDIGITSVGWAVMNLDIPRIEDLGVRIFDRAENPQTGESLALPRRLARSARRRLRRRKHRLERIRRLVIREGILTKEELDKLFEEKHEIDVWQLRVEALDRKLNNDELARVLLHLAKRRGFKSNRKSERSNKENSTMLKHIEENRAILSSYRTVGEMIVKDPKFALHKRNKGENYTNTIARDDLEREIRLIFSKQREFGNMSCTEEFENEYITIWASQRPVASKDDIEKKVGFCTFEPKEKRAPKATYTFQSFIAWEHINKLRLISPSGARGLTDEERRLLYEQAFQKNKITYHDIRTLLHLPDDTYFKGIVYDRGESRKQNENIRFLELDAYHQIRKAVDKVYGKGKSSSFLPIDFDTFGYALTLFKDDADIHSYLRNEYEQNGKRMPNLANKVYDNELIEELLNLSFTKFGHLSLKALRSILPYMEQGEVYSSACERAGYTFTGPKKKQKTMLLPNIPPIANPVVMRALTQARKVVNAIIKKYGSPVSIHIELARDLSQTFDERRKTKKEQDENRKKNETAIRQLMEYGLTLNPTGHDIVKFKLWSEQNGRCAYSLQPIEIERLLEPGYVEVDHVIPYSRSLDDSYTNKVLVLTRENREKGNRIPAEYLGVGTERWQQFETFVLTNKQFSKKKRDRLLRLHYDENEETEFKNRNLNDTRYISRFFANFIREHLKFAESDDKQKVYTVNGRVTAHLRSRWEFNKNREESDLHHAVDAVIVACTTPSDIAKVTAFYQRREQNKELAKKTEPHFPQPWPHFADELRARLSKHPKESIKALNLGNYDDQKLESLQPVFVSRMPKRSVTGAAHQETLRRYVGIDERSGKIQTVVKTKLSEIKLDASGHFPMYGKESDPRTYEAIRQRLLEHNNDPKKAFQEPLYKPKKNGEPGPVIRTVKIIDTKNQVIPLNDGKTVAYNSNIVRVDVFEKDGKYYCVPVYTMDIMKGILPNKAIEPNKPYSEWKEMTEDYTFRFSLYPNDLIRIELPREKTVKTAAGEEINVKDVFVYYKTIDSANGGLELISHDHRFSLRGVGSRTLKRFEKYQVDVLGNIYKVRGEKRVGLASSAHSKPGKTIRPLQSTRD

SEQ ID NO: 55 - protein, 1228 aa, L. bacterium
MSKLEKFTNCYSLSKTLRFKAIPVGKTQENIDNKRLLVEDEKRAEDYKGVKKLLDRYYLSFINDVLHSIKLKNLNNYISLFRKKTRTEKENKELENLEINLRKEIAKAFKGNEGYKSLFKKDIIETILPEFLDDKDEIALVNSFNGFTTAFTGFFDNRENMFSEEAKSTSIAFRCINENLTRYISNMDIFEKVDAIFDKHEVQEIKEKILNSDYDVEDFFEGEFFNFVLTQEGIDVYNAIIGGFVTESGEKIKGLNEYINLYNQKTKQKLPKFKPLYKQVLSDRESLSFYGEGYTSDEEVLEVFRNTLNKNSEIFSSIKKLEKLFKNFDEYSSAGIFVKNGPAISTISKDIFGEWNVIRDKWNAEYDDIHLKKKAVVTEKYEDDRRKSFKKIGSFSLEQLQEYADADLSVVEKLKEIIIQKVDEIYKVYGSSEKLFDADFVLEKSLKKNDAVVAIMKDLLDSVKSFENYIKAFFGEGKETNRDESFYGDFVLAYDILLKVDHIYDAIRNYVTQKPYSKDKFKLYFQNPQFMGGWDKDKETDYRATILRYGSKYYLAIMDKKYAKCLQKIDKDDVNGNYEKINYKLLPGPNKMLPKVFFSKKWMAYYNPSEDIQKIYKNGTFKKGDMFNLNDCHKLIDFFKDSISRYPKWSNAYDFNFSETEKYKDIAGFYREVEEQGYKVSFESASKKEVDKLVEEGKLYMFQIYNKDFSDKSHGTPNLHTMYFKLLFDENNHGQIRLSGGAELFMRRASLKKEELVVHPANSPIANKNPDNPKKTTTLSYDVYKDKRFSEDQYELHIPIAINKCPKNIFKINTEVRVLLKHDDNPYVIGIDRGERNLLYIVVVDGKGNIVEQYSLNEIINNFNGIRIKTDYHSLLDKKEKERFEARQNWTSIENIKELKAGYISQVVHKICELVEKYDAVIALEDLNSGFKNSRVKVEKQVYQKFEKMLIDKLNYMVDKKSNPCATGGALKGYQITNKFESFKSMSTQNGFIFYIPAWLTSKIDPSTGFVNLLKTKYTSIADSKKFISSFDRIMYVPEEDLFEFALDYKNFSRTDADYIKKWKLYSYGNRIRIFRNPKKNNVFDWEEVCLTSAYKELFNKYGINYQQGDIRALLCEQSDKAFYSSFMALMSLMLQMRNSITGRTDVDFLISPVKNSDGIFYDSRNYEAQENAILPKNADANGAYNIARKVLWAIGQFKKAEDEKLDKVKIAISNKEWLEYAQTSVKH

SEQ ID NO: 56 - protein, 1108 aa, Bacillus hisashii
MATRSFILKIEPNEEVKKGLWKTHEVLNHGIAYYMNILKLIRQEAIYEHHEQDPKNPKKVSKAEIQAELWDFVLKMQKCNSFTHEVDKDEVFNILRELYEELVPSSVEKKGEANQLSNKFLYPLVDPNSQSGKGTASSGRKPRWYNLKIAGDPSWEEEKKKWEEDKKKDPLAKILGKLAEYGLIPLFIPYTDSNEPIVKEIKWMEKSRNQSVRRLDKDMFIQALERFLSWESWNLKVKEEYEKVEKEYKTLEERIKEDIQALKALEQYEKERQEQLLRDTLNTNEYRLSKRGLRGWREIIQKWLKMDENEPSEKYLEVFKDYQRKHPREAGDYSVYEFLSKKENHFIWRNHPEYPYLYATFCEIDKKKKDAKQQATFTLADPINHPLWVRFEERSGSNLNKYRILTEQLHTEKLKKKLTVQLDRLIYPTESGGWEEKGKVDIVLLPSRQFYNQIFLDIEEKGKHAFTYKDESIKFPLKGTLGGARVQFDRDHLRRYPHKVESGNVGRIYFNMTVNIEPTESPVSKSLKIHRDDFPKVVNFKPKELTEWIKDSKGKKLKSGIESLEIGLRVMSIDLGQRQAAAASIFEVVDQKPDIEGKLFFPIKGTELYAVHRASFNIKLPGETLVKSREVLRKAREDNLKLMNQKLNFLRNVLHFQQFEDITEREKRVTKWISRQENSDVPLVYQDELIQIRELMYKPYKDWVAFLKQLHKRLEVEIGKEVKHWRKSLSDGRKGLYGISLKNIDEIDRTRKFLLRWSLRPTEPGEVRRLEPGQRFAIDQLNHLNALKEDRLKKMANTIIMHALGYCYDVRKKKWQAKNPACQIILFEDLSNYNPYEERSRFENSKLMKWSRREIPRQVALQGEIYGLQVGEVGAQFSSRFHAKTGSPGIRCSVVTKEKLQDNRFFKNLQREGRLTLDKIAVLKEGDLYPDKGGEKFISLSKDRKCVTTHADINAAQNLQKRFWTRTHGFYKVYCKAYQVDGQTVYIPESKDQKQKIIEEFGEGYFILKDGVYEWVNAGKLKIKKGSSKQSSSELVDSDILKDSFDLASELKGEKLMLYRDPSGNVFPSDKWMAAGVFFGKLERILISKLTNQYSISTIEDDSSKQSM

SEQ ID NO: 57 - protein, 1307 aa, Unknown
  Acidaminococcus sp. (strain BV3L6)
MTQFEGFTNLYQVSKTLRFELIPQGKTLKHIQEQGFIEEDKARNDHYKELKPIIDRIYKTYADQCLQLVQLDWENLSAAIDSYRKEKTEETRNALIEEQATYRNAIHDYFIGRTDNLTDAINKRHAEIYKGLFKAELFNGKVLKQLGTVTTTEHENALLRSFDKFTTYFSGFYENRKNVFSAEDISTAIPHRIVQDNFPKFKENCHIFTRLITAVPSLREHFENVKKAIGIFVSTSIEEVFSFPFYNQLLTQTQIDLYNQLLGGISREAGTEKIKGLNEVLNLAIQKNDETAHIIASLPHRFIPLFKQILSDRNTLSFILEEFKSDEEVIQSFCKYKTLLRNENVLETAEALFNELNSIDLTHIFISHKKLETISSALCDHWDTLRNALYERRISELTGKITKSAKEKVQRSLKHEDINLQEIISAAGKELSEAFKQKTSEILSHAHAALDQPLPTTLKKQEEKEILKSQLDSLLGLYHLLDWFAVDESNEVDPEFSARLTGIKLEMEPSLSFYNKARNYATKKPYSVEKFKLNFQMPTLASGWDVNKEKNNGAILFVKNGLYYLGIMPKQKGRYKALSFEPTEKTSEGFDKMYYDYFPDAAKMIPKCSTQLKAVTAHFQTHTTPILLSNNFIEPLEITKEIYDLNNPEKEPKKFQTAYAKKTGDQKGYREALCKWIDFTRDFLSKYTKTTSIDLSSLRPSSQYKDLGEYYAELNPLLYHISFQRIAEKEIMDAVETGKLYLFQIYNKDFAKGHHGKPNLHTLYWTGLFSPENLAKTSIKLNGQAELFYRPKSRMKRMAHRLGEKMLNKKLKDQKTPIPDTLYQELYDYVNHRLSHDLSDEARALLPNVITKEVSHEIIKDRRFTSDKFFFHVPITLNYQAANSPSKFNQRVNAYLKEHPETPIIGIDRGERNLIYITVIDSTGKILEQRSLNTIQQFDYQKKLDNREKERVAARQAWSVVGTIKDLKQGYLSQVIHEIVDLMIHYQAVVVLENLNFGFKSKRTGIAEKAVYQQFEKMLIDKLNCLVLKDYPAEKVGGVLNPYQLTDQFTSFAKMGTQSGFLFYVPAPYTSKIDPLTGFVDPFVWKTIKNHESRKHFLEGFDFLHYDVKTGDFILHFKMNRNLSFQRGLPGFMPAWDIVFEKNETQFDAKGTPFIAGKRIVPVIENHRFTGRYRDLYPANELIALLEEKGIVFRDGSNILPKLLENDDSHAIDTMVALIRSVLQMRNSNAATGEDYINSPVRDLNGVCFDSRFQNPEWPMDADANGAYHIALKGQLLLNHLKESKDLKLQNGISNQDWLAYIQELRN

SEQ ID NO: 58 - protein, 1307 aa, Unknown
  AsCas12a nickase
MTQFEGFTNLYQVSKTLRFELIPQGKTLKHIQEQGFIEEDKARNDHYKELKPIIDRIYKTYADQCLQLVQLDWENLSAAIDSYRKEKTEETRNALIEEQATYRNAIHDYFIGRTDNLTDAINKRHAEIYKGLFKAELFNGKVLKQLGTVTTTEHENALLRSFDKFTTYFSGFYENRKNVFSAEDISTAIPHRIVQDNFPKFKENCHIFTRLITAVPSLREHFENVKKAIGIFVSTSIEEVFSFPFYNQLLTQTQIDLYNQLLGGISREAGTEKIKGLNEVLNLAIQKNDETAHIIASLPHRFIPLFKQILSDRNTLSFILEEFKSDEEVIQSFCKYKTLLRNENVLETAEALFNELNSIDLTHIFISHKKLETISSALCDHWDTLRNALYERRISELTGKITKSAKEKVQRSLKHEDINLQEIISAAGKELSEAFKQKTSEILSHAHAALDQPLPTTLKKQEEKEILKSQLDSLLGLYHLLDWFAVDESNEVDPEFSARLTGIKLEMEPSLSFYNKARNYATKKPYSVEKFKLNFQMPTLASGWDVNKEKNNGAILFVKNGLYYLGIMPKQKGRYKALSFEPTEKTSEGFDKMYYDYFPDAAKMIPKCSTQLKAVTAHFQTHTTPILLSNNFIEPLEITKEIYDLNNPEKEPKKFQTAYAKKTGDQKGYREALCKWIDFTRDFLSKYTKTTSIDLSSLRPSSQYKDLGEYYAELNPLLYHISFQRIAEKEIMDAVETGKLYLFQIYNKDFAKGHHGKPNLHTLYWTGLFSPENLAKTSIKLNGQAELFYRPKSRMKRMAHRLGEKMLNKKLKDQKTPIPDTLYQELYDYVNHRLSHDLSDEARALLPNVITKEVSHEIIKDRRFTSDKFFFHVPITLNYQAANSPSKFNQRVNAYLKEHPETPIIGIDRGERNLIYITVIDSTGKILEQRSLNTIQQFDYQKKLDNREKERVAARQAWSVVGTIKDLKQGYLSQVIHEIVDLMIHYQAVVVLENLNFGFKSKRTGIAEKAVYQQFEKMLIDKLNCLVLKDYPAEKVGGVLNPYQLTDQFTSFAKMGTQSGFLFYVPAPYTSKIDPLTGFVDPFVWKTIKNHESRKHFLEGFDFLHYDVKTGDFILHFKMNRNLSFQRGLPGFMPAWDIVFEKNETQFDAKGTPFIAGKRIVPVIENHRFTGRYRDLYPANELIALLEEKGIVFRDGSNILPKLLENDDSHAIDTMVALIRSVLQMANSNAATGEDYINSPVRDLNGVCFDSRFQNPEWPMDADANGAYHIALKGQLLLNHLKESKDLKLQNGISNQDWLAYIQELRN

SEQ ID NO: 59 - protein, 1259 aa, Unknown
  Lachnospiraceae bacterium GAM79
MNYKTGLEDFIGKESLSKTLRNALIPTESTKIHMEEMGVIRDDELRAEKQQELKEIMDDYYRTFIEEKLGQIQGIQWNSLFQKMEETMEDISVRKDLDKIQNEKRKEICCYFTSDKRFKDLFNAKLITDILPNFIKDNKEYTEEEKAEKEQTRVLFQRFATAFTNYFNQRRNNFSEDNISTAISFRIVNENSEIHLQNMRAFQRIEQQYPEEVCGMEEEYKDMLQEWQMKHIYSVDFYDRELTQPGIEYYNGICGKINEHMNQFCQKNRINKNDFRMKKLHKQILCKKSSYYEIPFRFESDQEVYDALNEFIKTMKKKEIIRRCVHLGQECDDYDLGKIYISSNKYEQISNALYGSWDTIRKCIKEEYMDALPGKGEKKEEKAEAAAKKEEYRSIADIDKIISLYGSEMDRTISAKKCITEICDMAGQISIDPLVCNSDIKLLQNKEKTTEIKTILDSFLHVYQWGQTFIVSDIIEKDSYFYSELEDVLEDFEGITTLYNHVRSYVTQKPYSTVKFKLHFGSPTLANGWSQSKEYDNNAILLMRDQKFYLGIFNVRNKPDKQIIKGHEKEEKGDYKKMIYNLLPGPSKMLPKVFITSRSGQETYKPSKHILDGYNEKRHIKSSPKFDLGYCWDLIDYYKECIHKHPDWKNYDFHFSDTKDYEDISGFYREVEMQGYQIKWTYISADEIQKLDEKGQIFLFQIYNKDFSVHSTGKDNLHTMYLKNLFSEENLKDIVLKLNGEAELFFRKASIKTPIVHKKGSVLVNRSYTQTVGNKEIRVSIPEEYYTEIYNYLNHIGKGKLSSEAQRYLDEGKIKSFTATKDIVKNYRYCCDHYFLHLPITINFKAKSDVAVNERTLAYIAKKEDIHIIGIDRGERNLLYISVVDVHGNIREQRSFNIVNGYDYQQKLKDREKSRDAARKNWEEIEKIKELKEGYLSMVIHYIAQLVVKYNAVVAMEDLNYGFKTGRFKVERQVYQKFETMLIEKLHYLVFKDREVCEEGGVLRGYQLTYIPESLKKVGKQCGFIFYVPAGYTSKIDPTTGFVNLFSFKNLTNRESRQDFVGKFDEIRYDRDKKMFEFSFDYNNYIKKGTILASTKWKVYTNGTRLKRIVVNGKYTSQSMEVELTDAMEKMLQRAGIEYHDGKDLKGQIVEKGIEAEIIDIFRLTVQMRNSRSESEDREYDRLISPVLNDKGEFFDTATADKTLPQDADANGAYCIALKGLYEVKQIKENWKENEQFPRNKLVQDNKTWFDFMQKKRYL

SEQ ID NO: 60 - protein, 1306 aa, Prevotella copri
MAKNFEDFKRLYSLSKTLRFEAKPIGATLDNIVKSGLLDEDEHRAASYVKVKKLIDEYHKVFIDRVLDDGCLPLENKGNNNSLAEYYESYVSRAQDEDAKKKFKEIQQNLRSVIAKKLTEDKAYANLFGNKLIESYKDKEDKKKIIDSDLIQFINTAESTQLDSMSQDEAKELVKEFWGFVTYFYGFFDNRKNMYTAEEKSTGIAYRLVNENLPKFIDNIEAFNRAITRPEIQENMGVLYSDFSEYLNVESIQEMFQLDYYNMLLTQKQIDVYNAIIGGKTDDEHDVKIKGINEYINLYNQQHKDDKLPKLKALFKQILSDRNAISWLPEEFNSDQEVLNAIKDCYERLAENVLGDKVLKSLLGSLADYSLDGIFIRNDLQLTDISQKMFGNWGVIQNAIMQNIKRVAPARKHKESEEDYEKRIAGIFKKADSFSISYINDCLNEADPNNAYFVENYFATFGAVNTPTMQRENLFALVQNAYTEVAALLHSDYPTVKHLAQDKANVSKIKALLDAIKSLQHFVKPLLGKGDESDKDERFYGELASLWAELDTVTPLYNMIRNYMTRKPYSQKKIKLNFENPQLLGGWDANKEKDYATIILRRNGLYYLAIMDKDSRKLLGKAMPSDGECYEKMVYKFFKDVTTMIPKCSTQLKDVQAYFKVNTDDYVLNSKAFNKPLTITKEVFDLNNVLYGKYKKFQKGYLTATGDNVGYTHAVNVWIKFCMDFLNSYDSTCIYDFSSLKPESYLSLDAFYQDANLLLYKLSFARASVSYINQLVEEGKMYLFQIYNKDFSEYSKGTPNMHTLYWKALFDERNLADVVYKLNGQAEMFYRKKSIENTHPTHPANHPILNKNKDNKKKESLFDYDLIKDRRYTVDKFMFHVPITMNFKSVGSENINQDVKAYLRHADDMHIIGIDRGERHLLYLVVIDLQGNIKEQYSLNEIVNEYNGNTYHTNYHDLLDVREEERLKARQSWQTIENIKELKEGYLSQVIHKITQLMVRYHAIVVLEDLSKGFMRSRQKVEKQVYQKFEKMLIDKLNYLVDKKTDVSTPGGLLNAYQLTCKSDSSQKLGKQSGFLFYIPAWNTSKIDPVTGFVNLLDTHSLNSKEKIKAFFSKFDAIRYNKDKKWFEFNLDYDKFGKKAEDTRTKWTLCTRGMRIDTFRNKEKNSQWDNQEVDLTTEMKSLLEHYYIDIHGNLKDAISAQTDKAFFTGLLHILKLTLQMRNSITGTETDYLVSPVADENGIFYDSRSCGNQLPENADANGAYNIARKGLMLIEQIKNAEDLNNVKFDISNKAWLNFAQQKPYKNG

SEQ ID NO: 61 - protein, 1142 aa, Eubacterium rectale
MFSAKLISDILPEFVIHNNNYSASEKEEKTQVIKLFSRFATSFKDYFKNRANCFSANDISSSSCHRIVNDNAEIFFSNALVYRRIVKNLSNDDINKISGDMKDSLKEMSLEEIYSYEKYGEFITQEGISFYNDICGKVNLFMNLYCQKNKENKNLYKLRKLHKQILCIADTSYEVPYKFESDEEVYQSVNGFLDNISSKHIVERLRKIGENYNGYNLDKIYIVSKFYESVSQKTYRDWETINTALEIHYNNILPGNGKSKADKVKKAVKNDLQKSITEINELVSNYKLCPDDNIKAETYIHEISHILNNFEAQELKYNPEIHLVESELKASELKNVLDVIMNAFHWCSVFMTEELVDKDNNFYAELEEIYDEIYPVISLYNLVRNYVTQKPYSTKKIKLNFGIPTLADGWSKSKEYSNNAIILMRDNLYYLGIFNAKNKPDKKIIEGNTSENKGDYKKMIYNLLPGPNKMIPKVFLSSKTGVETYKPSAYILEGYKQNKHLKSSKDFDITFCHDLIDYFKNCIAIHPEWKNFGFDFSDTSTYEDISGFYREVELQGYKIDWTYISEKDIDLLQEKGQLYLFQIYNKDFSKKSSGNDNLHTMYLKNLFSEENLKDIVLKLNGEAEIFFRKSSIKNPIIHKKGSILVNRTYEAEEKDQFGNIQIVRKTIPENIYQELYKYFNDKSDKELSDEAAKLKNVVGHHEAATNIVKDYRYTYDKYFLHMPITINFKANKTSFINDRILQYIAKEKDLHVIGIDRGERNLIYVSVIDTCGNIVEQKSFNIVNGYDYQIKLKQQEGARQIARKEWKEIGKIKEIKEGYLSLVIHEISKMVIKYNAIIAMEDLSYGFKKGRFKVERQVYQKFETMLINKLNYLVFKDISITENGGLLKGYQLTYIPDKLKNVGHQCGCIFYVPAAYTSKIDPTTGFVNIFKFKDLTVDAKREFIKKFDSIRYDSDKNLFCFTFDYNNFITQNTVMSKSSWSVYTYGVRIKRRFVNGRFSNESDTIDITKDMEKTLEMTDINWRDGHDLRQDIIDYEIVQHIFEIFKLTVQMRNSLSELEDRDYDRLISPVLNENNIFYDSAKAGDALPKDADANGAYCIALKGLYEIKQITENWKEDGKFSRDKLKISNKDWFDFIQNKRYL

SEQ ID NO: 62 - protein, 1259 aa, Unknown
  Clostridium sp. AF34-10BH
MNYKTGLEDFIGKESLSKTLRNALIPTESTKIHMEEMGVIRDDELRAEKQQELKEIMDDYYRAFIEEKLGQIQGIQWNSLFQKMEETMEDISVRKDLDKIQNEKRKEICCYFTSDKRFKDLFNAKLITDILPNFIKDNKEYTEEEKAEKEQTRVLFQRFATAFTNYFNQRRNNFSEDNISTAISFRIVNENSEIHLQNMRAFQRIEQQYPEEVCGMEEEYKDMLQEWQMKHIYLVDFYDRVLTQPGIEYYNGICGKINEHMNQFCQKNRINKNDFRMKKLHKQILCKKSSYYEIPFRFESDQEVYDALNEFIKTMKEKEIICRCVHLGQKCDDYDLGKIYISSNKYEQISNALYGSWDTIRKCIKEEYMDALPGKGEKKEEKAEAAAKKEEYRSIADIDKIISLYGSEMDRTISAKKCITEICDMAGQISTDPLVCNSDIKLLQNKEKTTEIKTILDSFLHVYQWGQTFIVSDIIEKDSYFYSELEDVLEDFEGITTLYNHVRSYVTQKPYSTVKFKLHFGSPTLANGWSQSKEYDNNAILLMRDQKFYLGIFNVRNKPDKQIIKGHEKEEKGDYKKMIYNLLPGPSKMLPKVFITSRSGQETYKPSKHILDGYNEKRHIKSSPKFDLGYCWDLIDYYKECIHKHPDWKNYDFHFSDTKDYEDISGFYREVEMQGYQIKWTYISADEIQKLDEKGQIFLFQIYNKDFSVHSTGKDNLHTMYLKNLFSEENLKDIVLKLNGEAELFFRKASIKTPVVHKKGSVLVNRSYTQTVGDKEIRVSIPEEYYTEIYNYLNHIGRGKLSTEAQRYLEERKIKSFTATKDIVKNYRYCCDHYFLHLPITINFKAKSDIAVNERTLAYIAKKEDIHIIGIDRGERNLLYISVVDVHGNIREQRSFNIVNGYDYQQKLKDREKSRDAARKNWEEIEKIKELKEGYLSMVIHYIAQLVVKYNAVVAMEDLNYGFKTGRFKVERQVYQKFETMLIEKLHYLVFKDREVCEEGGVLRGYQLTYIPESLKKVGKQCGFIFYVPAGYTSKIDPTTGFVNLFSFKNLTNRESRQDFVGKFDEIRYDRDKKMFEFSFDYNNYIKKGTMLASTKWKVYTNGTRLKRIVVNGKYTSQSMEVELTDAMEKMLQRAGIEYHDGKDLKGQIVEKGIEAEIIDIFRLTVQMRNSRSESEDREYDRLISPVLNDKGEFFDTATADKTLPQDADANGAYCIALKGLYEVKQIKENWKENEQFPRNKLVQDNKTWFDFMQKKRYL

SEQ ID NO: 63 - protein, 1108 aa, Bacillus hisashii; identical to SEQ ID NO: 56

SEQ ID NO: 64 - protein, 1465 aa, Thermomonas hydrothermalis
MSEKTTQRAYTLRLNRASGECAVCQNNSCDCWHDALWATHKAVNRGAKAFGDWLLTLRGGLCHTLVEMEVPAKGNNPPQRPTDQERRDRRVLLALSWLSVEDEHGAPKEFIVATGRDSADDRAKKVEEKLREILEKRDFQEHEIDAWLQDCGPSLKAHIREDAVWVNRRALFDAAVERIKTLTWEEAWDFLEPFFGTQYFAGIGDGKDKDDAEGPARQGEKAKDLVQKAGQWLSARFGIGTGADFMSMAEAYEKIAKWASQAQNGDNGKATIEKLACALRPSEPPTLDTVLKCISGPGHKSATREYLKTLDKKSTVTQEDLNQLRKLADEDARNCRKKVGKKGKKPWADEVLKDVENSCELTYLQDNSPARHREFSVMLDHAARRVSMAHSWIKKAEQRRRQFESDAQKLKNLQERAPSAVEWLDRFCESRSMTTGANTGSGYRIRKRAIEGWSYVVQAWAEASCDTEDKRIAAARKVQADPEIEKFGDIQLFEALAADEAICVWRDQEGTQNPSILIDYVTGKTAEHNQKRFKVPAYRHPDELRHPVFCDFGNSRWSIQFAIHKEIRDRDKGAKQDTRQLQNRHGLKMRLWNGRSMTDVNLHWSSKRLTADLALDQNPNPNPTEVTRADRLGRAASSAFDHVKIKNVFNEKEWNGRLQAPRAELDRIAKLEEQGKTEQAEKLRKRLRWYVSFSPCLSPSGPFIVYAGQHNIQPKRSGQYAPHAQANKGRARLAQLILSRLPDLRILSVDLGHRFAAACAVWETLSSDAFRREIQGLNVLAGGSGEGDLFLHVEMTGDDGKRRTVVYRRIGPDQLLDNTPHPAPWARLDRQFLIKLQGEDEGVREASNEELWTVHKLEVEVGRTVPLIDRMVRSGFGKTEKQKERLKKLRELGWISAMPNEPSAETDEKEGEIRSISRSVDELMSSALGTLRLALKRHGNRARIAFAMTADYKPMPGGQKYYFHEAKEASKNDDETKRRDNQIEFLQDALSLWHDLFSSPDWEDNEAKKLWQNHIATLPNYQTPEEISAELKRVERNKKRKENRDKLRTAAKALAENDQLRQHLHDTWKERWESDDQQWKERLRSLKDWIFPRGKAEDNPSIRHVGGLSITRINTISGLYQILKAFKMRPEPDDLRKNIPQKGDDELENFNRRLLEARDRLREQRVKQLASRIIEAALGVGRIKIPKNGKLPKRPRTTVDTPCHAVVIESLKTYRPDDLRTRRENRQLMQWSSAKVRKYLKEGCELYGLHFLEVPANYTSRQCSRTGLPGIRCDDVPTGDFLKAPWWRRAINTAREKNGGDAKDRFLVDLYDHLNNLQSKGEALPATVRVPRQGGNLFIAGAQLDDTNKERRAIQADLNAAANIGLRALLDPDWRGRWWYVPCKDGTSEPALDRIEGSTAFNDVRSLPTGDNSSRRAPREIENLWRDPSGDSLESGTWSPTRAYWDTVQSRVIELLRRHAGLPTS

SEQ ID NO: 65 - protein, 1090 aa, Laceyella sacchari
MSIRSFKLKLKTKSGVNAEQLRRGLWRTHQLINDGIAYYMNWLVLLRQEDLFIRNKETNEIEKRSKEEIQAVLLERVHKQQQRNQWSGEVDEQTLLQALRQLYEEIVPSVIGKSGNASLKARFFLGPLVDPNNKTTKDVSKSGPTPKWKKMKDAGDPNWVQEYEKYMAERQTLVRLEEMGLIPLFPMYTDEVGDIHWLPQASGYTRTWDRDMFQQAIERLLSWESWNRRVRERRAQFEKKTHDFASRFSESDVQWMNKLREYEAQQEKSLEENAFAPNEPYALTKKALRGWERVYHSWMRLDSAASEEAYWQEVATCQTAMRGEFGDPAIYQFLAQKENHDIWRGYPERVIDFAELNHLQRELRRAKEDATFTLPDSVDHPLWVRYEAPGGTNIHGYDLVQDTKRNLTLILDKFILPDENGSWHEVKKVPFSLAKSKQFHRQVWLQEEQKQKKREVVFYDYSTNLPHLGTLAGAKLQWDRNFLNKRTQQQIEETGEIGKVFFNISVDVRPAVEVKNGRLQNGLGKALTVLTHPDGTKIVTGWKAEQLEKWVGESGRVSSLGLDSLSEGLRVMSIDLGQRTSATVSVFEITKEAPDNPYKFFYQLEGTEMFAVHQRSFLLALPGENPPQKIKQMREIRWKERNRIKQQVDQLSAILRLHKKVNEDERIQAIDKLLQKVASWQLNEEIATAWNQALSQLYSKAKENDLQWNQAIKNAHHQLEPVVGKQISLWRKDLSTGRQGIAGLSLWSIEELEATKKLLTRWSKRSREPGVVKRIERFETFAKQIQHHINQVKENRLKQLANLIVMTALGYKYDQEQKKWIEVYPACQVVLFENLRSYRFSFERSRRENKKLMEWSHRSIPKLVQMQGELFGLQVADVYAAYSSRYHGRTGAPGIRCHALTEADLRNETNIIHELIEAGFIKEEHRPYLQQGDLVPWSGGELFATLQKPYDNPRILTLHADINAAQNIQKRFWHPSMWFRVNCESVMEGEIVTYVPKNKTVHKKQGKTFRFVKVEGSDVYEWAKWSKNRNKNTFSSITERKPPSSMILFRDPSGTFFKEQEWVEQKTFWGKVQSMIQAYMKKTIVQRMEE

SEQ ID NO: 66 - protein, 1194 aa, Dsulfonatronum thiodismutans
MVLGRKDDTAELRRALWTTHEHVNLAVAEVERVLLRCRGRSYWTLDRRGDPVHVPESQVAEDALAMAREAQRRNGWPVVGEDEEILLALRYLYEQIVPSCLLDDLGKPLKGDAQKIGTNYAGPLFDSDTCRRDEGKDVACCGPFHEVAGKYLGALPEWATPISKQEFDGKDASHLRFKATGGDDAFFRVSIEKANAWYEDPANQDALKNKAYNKDDWKKEKDKGISSWAVKYIQKQLQLGQDPRTEVRRKLWLELGLLPLFIPVFDKTMVGNLWNRLAVRLALAHLLSWESWNHRAVQDQALARAKRDELAALFLGMEDGFAGLREYELRRNESIKQHAFEPVDRPYVVSGRALRSWTRVREEWLRHGDTQESRKNICNRLQDRLRGKFGDPDVFHWLAEDGQEALWKERDCVTSFSLLNDADGLLEKRKGYALMTFADARLHPRWAMYEAPGGSNLRTYQIRKTENGLWADVVLLSPRNESAAVEEKTFNVRLAPSGQLSNVSFDQIQKGSKMVGRCRYQSANQQFEGLLGGAEILFDRKRIANEQHGATDLASKPGHVWFKLTLDVRPQAPQGWLDGKGRPALPPEAKHFKTALSNKSKFADQVRPGLRVLSVDLGVRSFAACSVFELVRGGPDQGTYFPAADGRTVDDPEKLWAKHERSFKITLPGENPSRKEEIARRAAMEELRSLNGDIRRLKAILRLSVLQEDDPRTEHLRLFMEAIVDDPAKSALNAELFKGFGDDRFRSTPDLWKQHCHFFHDKAEKVVAERFSRWRTETRPKSSSWQDWRERRGYAGGKSYWAVTYLEAVRGLILRWNMRGRTYGEVNRQDKKQFGTVASALLHHINQLKEDRIKTGADMIIQAARGFVPRKNGAGWVQVHEPCRLILFEDLARYRFRTDRSRRENSRLMRWSHREIVNEVGMQGELYGLHVDTTEAGFSSRYLASSGAPGVRCRHLVEEDFHDGLPGMHLVGELDWLLPKDKDRTANEARRLLGGMVRPGMLVPWDGGELFATLNAASQLHVIHADINAAQNLQRRFWGRCGEAIRIVCNQLSVDGSTRYEMAKAPKARLLGALQQLKNGDAPFHLTSIPNSQKPENSYVMTPTNAGKKYRAGPGEKSSGEEDELALDIVEQAEELAQGRKTFFRDPSGVFFAPDRWLPSEIYWSRIRRRIWQVTLERNSSGRQERAEMDEMPY

SEQ ID NO: 67 - protein, 1387 aa, Artificial Sequence
  Synthetic
DYKVYDVRKMIAKSEQEIGKATAKYFFYSNIMNFFKTEITLANGEIRKRPLIETNGETGEIVWDKGRDFATVRKVLSMPQVNIVKKTEVQTGGFSKESILPKRNSDKLIARKKDWDPKKYGGFDSPTVAYSVLVVAKVEKGKSKKLKSVKELLGITIMERSSFEKNPIDFLEAKGYKEVKKDLIIKLPKYSLFELENGRKRMLASAGELQKGNELALPSKYVNFLYLASHYEKLKGSPEDNEQKQLFVEQHKHYLDEIIEQISEFSKRVILADANLDKVLSAYNKHRDKPIREQAENIIHLFTLTNLGAPAAFKYFDTTIDRKRYTSTKEVLDATLIHQSITGLYETRIDLSQLGGDGGSGGSGGSGGSGGSGGSGGDKKYSIGLAIGTNSVGWAVITDEYKVPSKKFKVLGNTDRHSIKKNLIGALLFDSGETAEATRLKRTARRRYTRRKNRICYLQEIFSNEMAKVDDSFFHRLEESFLVEEDKKHERHPIFGNIVDEVAYHEKYPTIYHLRKKLVDSTDKADLRLIYLALAHMIKFRGHFLIEGDLNPDNSDVDKLFIQLVQTYNQLFEENPINASGVDAKAILSARLSKSRRLENLIAQLPGEKKNGLFGNLIALSLGLTPNFKSNFDLAEDAKLQLSKDTYDDDLDNLLAQIGDQYADLFLAAKNLSDAILLSDILRVNTEITKAPLSASMIKRYDEHHQDLTLLKALVRQQLPEKYKEIFFDQSKNGYAGYIDGGASQEEFYKFIKPILEKMDGTEELLVKLNREDLLRKQRTFDNGSIPHQIHLGELHAILRRQEDFYPFLKDNREKIEKILTFRIPYYVGPLARGNSRFAWMTRKSEETITPWNFEEVVDKGASAQSFIERMTNFDKNLPNEKVLPKHSLLYEYFTVYNELTKVKYVTEGMRKPAFLSGEQKKAIVDLLFKTNRKVTVKQLKEDYFKKIECFDSVEISGVEDRFNASLGTYHDLLKIIKDKDFLDNEENEDILEDIVLTLTLFEDREMIEERLKTYAHLFDDKVMKQLKRRRYTGWGRLSRKLINGIRDKQSGKTILDFLKSDGFANRNFMQLIHDDSLTFKEDIQKAQVSGQGDSLHEHIANLAGSPAIKKGILQTVKVVDELVKVMGRHKPENIVIEMARENQTTQKGQKNSRERMKRIEEGIKELGSQILKEHPVENTQLQNEKLYLYYLQNGRDMYVDQELDINRLSDYDVDHIVPQSFLKDDSIDNKVLTRSDKNRGKSDNVPSEEVVKKMKNYWRQLLNAKLITQRKFDNLTKAERGGLSELDKAGFIKRQLVETRQITKHVAQILDSRMNTKYDENDKLIREVKVITLKSKLVSDFRKDFQFYKVREINNYHHAHDAYLNAVVGTALIKKYPKLESEFVYG

SEQ ID NO: 68 - protein, 1388 aa, Artificial Sequence
  Synthetic
EIGKATAKYFFYSNIMNFFKTEITLANGEIRKRPLIETNGETGEIVWDKGRDFATVRKVLSMPQVNIVKKTEVQTGGFSKESILPKRNSDKLIARKKDWDPKKYGGFDSPTVAYSVLVVAKVEKGKSKKLKSVKELLGITIMERSSFEKNPIDFLEAKGYKEVKKDLIIKLPKYSLFELENGRKRMLASAGELQKGNELALPSKYVNFLYLASHYEKLKGSPEDNEQKQLFVEQHKHYLDEIIEQISEFSKRVILADANLDKVLSAYNKHRDKPIREQAENIIHLFTLTNLGAPAAFKYFDTTIDRKRYTSTKEVLDATLIHQSITGLYETRIDLSQLGGDGGSGGSGGSGGSGGSGGSGGMDKKYSIGLAIGTNSVGWAVITDEYKVPSKKFKVLGNTDRHSIKKNLIGALLFDSGETAEATRLKRTARRRYTRRKNRICYLQEIFSNEMAKVDDSFFHRLEESFLVEEDKKHERHPIFGNIVDEVAYHEKYPTIYHLRKKLVDSTDKADLRLIYLALAHMIKFRGHFLIEGDLNPDNSDVDKLFIQLVQTYNQLFEENPINASGVDAKAILSARLSKSRRLENLIAQLPGEKKNGLFGNLIALSLGLTPNFKSNFDLAEDAKLQLSKDTYDDDLDNLLAQIGDQYADLFLAAKNLSDAILLSDILRVNTEITKAPLSASMIKRYDEHHQDLTLLKALVRQQLPEKYKEIFFDQSKNGYAGYIDGGASQEEFYKFIKPILEKMDGTEELLVKLNREDLLRKQRTFDNGSIPHQIHLGELHAILRRQEDFYPFLKDNREKIEKILTFRIPYYVGPLARGNSRFAWMTRKSEETITPWNFEEVVDKGASAQSFIERMTNFDKNLPNEKVLPKHSLLYEYFTVYNELTKVKYVTEGMRKPAFLSGEQKKAIVDLLFKTNRKVTVKQLKEDYFKKIECFDSVEISGVEDRFNASLGTYHDLLKIIKDKDFLDNEENEDILEDIVLTLTLFEDREMIEERLKTYAHLFDDKVMKQLKRRRYTGWGRLSRKLINGIRDKQSGKTILDFLKSDGFANRNFMQLIHDDSLTFKEDIQKAQVSGQGDSLHEHIANLAGSPAIKKGILQTVKVVDELVKVMGRHKPENIVIEMARENQTTQKGQKNSRERMKRIEEGIKELGSQILKEHPVENTQLQNEKLYLYYLQNGRDMYVDQELDINRLSDYDVDHIVPQSFLKDDSIDNKVLTRSDKNRGKSDNVPSEEVVKKMKNYWRQLLNAKLITQRKFDNLTKAERGGLSELDKAGFIKRQLVETRQITKHVAQILDSRMNTKYDENDKLIREVKVITLKSKLVSDFRKDFQFYKVREINNYHHAHDAYLNAVVGTALIKKYPKLESEFVYGDYKVYDVRKMIAKSEQ

SEQ ID NO: 69 - protein, 1387 aa, Artificial Sequence
  Synthetic
NIMNFFKTEITLANGEIRKRPLIETNGETGEIVWDKGRDFATVRKVLSMPQVNIVKKTEVQTGGFSKESILPKRNSDKLIARKKDWDPKKYGGFDSPTVAYSVLVVAKVEKGKSKKLKSVKELLGITIMERSSFEKNPIDFLEAKGYKEVKKDLIIKLPKYSLFELENGRKRMLASAGELQKGNELALPSKYVNFLYLASHYEKLKGSPEDNEQKQLFVEQHKHYLDEIIEQISEFSKRVILADANLDKVLSAYNKHRDKPIREQAENIIHLFTLTNLGAPAAFKYFDTTIDRKRYTSTKEVLDATLIHQSITGLYETRIDLSQLGGDGGSGGSGGSGGSGGSGGSGGDKKYSIGLAIGTNSVGWAVITDEYKVPSKKFKVLGNTDRHSIKKNLIGALLFDSGETAEATRLKRTARRRYTRRKNRICYLQEIFSNEMAKVDDSFFHRLEESFLVEEDKKHERHPIFGNIVDEVAYHEKYPTIYHLRKKLVDSTDKADLRLIYLALAHMIKFRGHFLIEGDLNPDNSDVDKLFIQLVQTYNQLFEENPINASGVDAKAILSARLSKSRRLENLIAQLPGEKKNGLFGNLIALSLGLTPNFKSNFDLAEDAKLQLSKDTYDDDLDNLLAQIGDQYADLFLAAKNLSDAILLSDILRVNTEITKAPLSASMIKRYDEHHQDLTLLKALVRQQLPEKYKEIFFDQSKNGYAGYIDGGASQEEFYKFIKPILEKMDGTEELLVKLNREDLLRKQRTFDNGSIPHQIHLGELHAILRRQEDFYPFLKDNREKIEKILTFRIPYYVGPLARGNSRFAWMTRKSEETITPWNFEEVVDKGASAQSFIERMTNFDKNLPNEKVLPKHSLLYEYFTVYNELTKVKYVTEGMRKPAFLSGEQKKAIVDLLFKTNRKVTVKQLKEDYFKKIECFDSVEISGVEDRFNASLGTYHDLLKIIKDKDFLDNEENEDILEDIVLTLTLFEDREMIEERLKTYAHLFDDKVMKQLKRRRYTGWGRLSRKLINGIRDKQSGKTILDFLKSDGFANRNFMQLIHDDSLTFKEDIQKAQVSGQGDSLHEHIANLAGSPAIKKGILQTVKVVDELVKVMGRHKPENIVIEMARENQTTQKGQKNSRERMKRIEEGIKELGSQILKEHPVENTQLQNEKLYLYYLQNGRDMYVDQELDINRLSDYDVDHIVPQSFLKDDSIDNKVLTRSDKNRGKSDNVPSEEVVKKMKNYWRQLLNAKLITQRKFDNLTKAERGGLSELDKAGFIKRQLVETRQITKHVAQILDSRMNTKYDENDKLIREVKVITLKSKLVSDFRKDFQFYKVREINNYHHAHDAYLNAVVGTALIKKYPKLESEFVYGDYKVYDVRKMIAKSEQEIGKATAKYFFYS

SEQ ID NO: 70 - protein, 1388 aa, Artificial Sequence
  Synthetic
PEDNEQKQLFVEQHKHYLDEIIEQISEFSKRVILADANLDKVLSAYNKHRDKPIREQAENIIHLFTLTNLGAPAAFKYFDTTIDRKRYTSTKEVLDATLIHQSITGLYETRIDLSQLGGDGGSGGSGGSGGSGGSGGSGGMDKKYSIGLAIGTNSVGWAVITDEYKVPSKKFKVLGNTDRHSIKKNLIGALLFDSGETAEATRLKRTARRRYTRRKNRICYLQEIFSNEMAKVDDSFFHRLEESFLVEEDKKHERHPIFGNIVDEVAYHEKYPTIYHLRKKLVDSTDKADLRLIYLALAHMIKFRGHFLIEGDLNPDNSDVDKLFIQLVQTYNQLFEENPINASGVDAKAILSARLSKSRRLENLIAQLPGEKKNGLFGNLIALSLGLTPNFKSNFDLAEDAKLQLSKDTYDDDLDNLLAQIGDQYADLFLAAKNLSDAILLSDILRVNTEITKAPLSASMIKRYDEHHQDLTLLKALVRQQLPEKYKEIFFDQSKNGYAGYIDGGASQEEFYKFIKPILEKMDGTEELLVKLNREDLLRKQRTFDNGSIPHQIHLGELHAILRRQEDFYPFLKDNREKIEKILTFRIPYYVGPLARGNSRFAWMTRKSEETITPWNFEEVVDKGASAQSFIERMTNFDKNLPNEKVLPKHSLLYEYFTVYNELTKVKYVTEGMRKPAFLSGEQKKAIVDLLFKTNRKVTVKQLKEDYFKKIECFDSVEISGVEDRFNASLGTYHDLLKIIKDKDFLDNEENEDILEDIVLTLTLFEDREMIEERLKTYAHLFDDKVMKQLKRRRYTGWGRLSRKLINGIRDKQSGKTILDFLKSDGFANRNFMQLIHDDSLTFKEDIQKAQVSGQGDSLHEHIANLAGSPAIKKGILQTVKVVDELVKVMGRHKPENIVIEMARENQTTQKGQKNSRERMKRIEEGIKELGSQILKEHPVENTQLQNEKLYLYYLQNGRDMYVDQELDINRLSDYDVDHIVPQSFLKDDSIDNKVLTRSDKNRGKSDNVPSEEVVKKMKNYWRQLLNAKLITQRKFDNLTKAERGGLSELDKAGFIKRQLVETRQITKHVAQILDSRMNTKYDENDKLIREVKVITLKSKLVSDFRKDFQFYKVREINNYHHAHDAYLNAVVGTALIKKYPKLESEFVYGDYKVYDVRKMIAKSEQEIGKATAKYFFYSNIMNFFKTEITLANGEIRKRPLIETNGETGEIVWDKGRDFATVRKVLSMPQVNIVKKTEVQTGGFSKESILPKRNSDKLIARKKDWDPKKYGGFDSPTVAYSVLVVAKVEKGKSKKLKSVKELLGITIMERSSFEKNPIDFLEAKGYKEVKKDLIIKLPKYSLFELENGRKRMLASAGELQKGNELALPSKYVNFLYLASHYEKLKGS

SEQ ID NO: 71 - protein, 1387 aa, Artificial Sequence
  Synthetic
KPIREQAENIIHLFTLTNLGAPAAFKYFDTTIDRKRYTSTKEVLDATLIHQSITGLYETRIDLSQLGGDGGSGGSGGSGGSGGSGGSGGDKKYSIGLAIGTNSVGWAVITDEYKVPSKKFKVLGNTDRHSIKKNLIGALLFDSGETAEATRLKRTARRRYTRRKNRICYLQEIFSNEMAKVDDSFFHRLEESFLVEEDKKHERHPIFGNIVDEVAYHEKYPTIYHLRKKLVDSTDKADLRLIYLALAHMIKFRGHFLIEGDLNPDNSDVDKLFIQLVQTYNQLFEENPINASGVDAKAILSARLSKSRRLENLIAQLPGEKKNGLFGNLIALSLGLTPNFKSNFDLAEDAKLQLSKDTYDDDLDNLLAQIGDQYADLFLAAKNLSDAILLSDILRVNTEITKAPLSASMIKRYDEHHQDLTLLKALVRQQLPEKYKEIFFDQSKNGYAGYIDGGASQEEFYKFIKPILEKMDGTEELLVKLNREDLLRKQRTFDNGSIPHQIHLGELHAILRRQEDFYPFLKDNREKIEKILTFRIPYYVGPLARGNSRFAWMTRKSEETITPWNFEEVVDKGASAQSFIERMTNFDKNLPNEKVLPKHSLLYEYFTVYNELTKVKYVTEGMRKPAFLSGEQKKAIVDLLFKTNRKVTVKQLKEDYFKKIECFDSVEISGVEDRFNASLGTYHDLLKIIKDKDFLDNEENEDILEDIVLTLTLFEDREMIEERLKTYAHLFDDKVMKQLKRRRYTGWGRLSRKLINGIRDKQSGKTILDFLKSDGFANRNFMQLIHDDSLTFKEDIQKAQVSGQGDSLHEHIANLAGSPAIKKGILQTVKVVDELVKVMGRHKPENIVIEMARENQTTQKGQKNSRERMKRIEEGIKELGSQILKEHPVENTQLQNEKLYLYYLQNGRDMYVDQELDINRLSDYDVDHIVPQSFLKDDSIDNKVLTRSDKNRGKSDNVPSEEVVKKMKNYWRQLLNAKLITQRKFDNLTKAERGGLSELDKAGFIKRQLVETRQITKHVAQILDSRMNTKYDENDKLIREVKVITLKSKLVSDFRKDFQFYKVREINNYHHAHDAYLNAVVGTALIKKYPKLESEFVYGDYKVYDVRKMIAKSEQEIGKATAKYFFYSNIMNFFKTEITLANGEIRKRPLIETNGETGEIVWDKGRDFATVRKVLSMPQVNIVKKTEVQTGGFSKESILPKRNSDKLIARKKDWDPKKYGGFDSPTVAYSVLVVAKVEKGKSKKLKSVKELLGITIMERSSFEKNPIDFLEAKGYKEVKKDLIIKLPKYSLFELENGRKRMLASAGELQKGNELALPSKYVNFLYLASHYEKLKGSPEDNEQKQLFVEQHKHYLDEIIEQISEFSKRVILADANLDKVLSAYNKHRD

SEQ ID NO: 72 - protein, 357 aa, Artificial Sequence
  Synthetic
DYKVYDVRKMIAKSEQEIGKATAKYFFYSNIMNFFKTEITLANGEIRKRPLIETNGETGEIVWDKGRDFATVRKVLSMPQVNIVKKTEVQTGGFSKESILPKRNSDKLIARKKDWDPKKYGGFDSPTVAYSVLVVAKVEKGKSKKLKSVKELLGITIMERSSFEKNPIDFLEAKGYKEVKKDLIIKLPKYSLFELENGRKRMLASAGELQKGNELALPSKYVNFLYLASHYEKLKGSPEDNEQKQLFVEQHKHYLDEIIEQISEFSKRVILADANLDKVLSAYNKHRDKPIREQAENIIHLFTLTNLGAPAAFKYFDTTIDRKRYTSTKEVLDATLIHQSITGLYETRIDLSQLGGD

SEQ ID NO: 73 - protein, 341 aa, Artificial Sequence
  Synthetic
EIGKATAKYFFYSNIMNFFKTEITLANGEIRKRPLIETNGETGEIVWDKGRDFATVRKVLSMPQVNIVKKTEVQTGGFSKESILPKRNSDKLIARKKDWDPKKYGGFDSPTVAYSVLVVAKVEKGKSKKLKSVKELLGITIMERSSFEKNPIDFLEAKGYKEVKKDLIIKLPKYSLFELENGRKRMLASAGELQKGNELALPSKYVNFLYLASHYEKLKGSPEDNEQKQLFVEQHKHYLDEIIEQISEFSKRVILADANLDKVLSAYNKHRDKPIREQAENIIHLFTLTNLGAPAAFKYFDTTIDRKRYTSTKEVLDATLIHQSITGLYETRIDLSQLGGD

SEQ ID NO: 74 - protein, 328 aa, Artificial Sequence
  Synthetic
NIMNFFKTEITLANGEIRKRPLIETNGETGEIVWDKGRDFATVRKVLSMPQVNIVKKTEVQTGGFSKESILPKRNSDKLIARKKDWDPKKYGGFDSPTVAYSVLVVAKVEKGKSKKLKSVKELLGITIMERSSFEKNPIDFLEAKGYKEVKKDLIIKLPKYSLFELENGRKRMLASAGELQKGNELALPSKYVNFLYLASHYEKLKGSPEDNEQKQLFVEQHKHYLDEIIEQISEFSKRVILADANLDKVLSAYNKHRDKPIREQAENIIHLFTLTNLGAPAAFKYFDTTIDRKRYTSTKEVLDATLIHQSITGLYETRIDLSQLGGD

SEQ ID NO: 75 - protein, 120 aa, Artificial Sequence
  Synthetic
PEDNEQKQLFVEQHKHYLDEIIEQISEFSKRVILADANLDKVLSAYNKHRDKPIREQAENIIHLFTLTNLGAPAAFKYFDTTIDRKRYTSTKEVLDATLIHQSITGLYETRIDLSQLGGD

SEQ ID NO: 76 - protein, 69 aa, Artificial Sequence
  Synthetic
KPIREQAENIIHLFTLTNLGAPAAFKYFDTTIDRKRYTSTKEVLDATLIHQSITGLYETRIDLSQLGGD

SEQ ID NO: 77 - protein, 1367 aa, Artificial Sequence
  Synthetic
DKKYSIGLDIGTNSVGWAVITDEYKVPSKKFKVLGNTDRHSIKKNLIGALLFDSGETAEATRLKRTARRRYTRRKNRICYLQEIFSNEMAKVDDSFFHRLEESFLVEEDKKHERHPIFGNIVDEVAYHEKYPTIYHLRKKLVDSTDKADLRLIYLALAHMIKFRGHFLIEGDLNPDNSDVDKLFIQLVQTYNQLFEENPINASGVDAKAILSARLSKSRRLENLIAQLPGEKKNGLFGNLIALSLGLTPNFKSNFDLAEDAKLQLSKDTYDDDLDNLLAQIGDQYADLFLAAKNLSDAILLSDILRVNTEITKAPLSASMIKRYDEHHQDLTLLKALVRQQLPEKYKEIFFDQSKNGYAGYIDGGASQEEFYKFIKPILEKMDGTEELLVKLNREDLLRKQRTFDNGSIPHQIHLGELHAILRRQEDFYPFLKDNREKIEKILTFRIPYYVGPLARGNSRFAWMTRKSEETITPWNFEEVVDKGASAQSFIERMTNFDKNLPNEKVLPKHSLLYEYFTVYNELTKVKYVTEGMRKPAFLSGEQKKAIVDLLFKTNRKVTVKQLKEDYFKKIECFDSVEISGVEDRFNASLGTYHDLLKIIKDKDFLDNEENEDILEDIVLTLTLFEDREMIEERLKTYAHLFDDKVMKQLKRRRYTGWGRLSRKLINGIRDKQSGKTILDFLKSDGFANRNFMQLIHDDSLTFKEDIQKAQVSGQGDSLHEHIANLAGSPAIKKGILQTVKVVDELVKVMGRHKPENIVIEMARENQTTQKGQKNSRERMKRIEEGIKELGSQILKEHPVENTQLQNEKLYLYYLQNGRDMYVDQELDINRLSDYDVDAIVPQSFLKDDSIDNKVLTRSDKNRGKSDNVPSEEVVKKMKNYWRQLLNAKLITQRKFDNLTKAERGGLSELDKAGFIKRQLVETRQITKHVAQILDSRMNTKYDENDKLIREVKVITLKSKLVSDFRKDFQFYKVREINNYHHAHDAYLNAVVGTALIKKYPKLESEFVYGDYKVYDVRKMIAKSEQEIGKATAKYFFYSNIMNFFKTEITLANGEIRKRPLIETNGETGEIVWDKGRDFATVRKVLSMPQVNIVKKTEVQTGGFSKESILPKRNSDKLIARKKDWDPKKYGGFVSPTVAYSVLVVAKVEKGKSKKLKSVKELLGITIMERSSFEKNPIDFLEAKGYKEVKKDLIIKLPKYSLFELENGRKRMLASARELQKGNELALPSKYVNFLYLASHYEKLKGSPEDNEQKQLFVEQHKHYLDEIIEQISEFSKRVILADANLDKVLSAYNKHRDKPIREQAENIIHLFTLTNLGAPAAFKYFDTTIDRKQYRSTKEVLDATLIHQSITGLYETRIDLSQLGGD

SEQ ID NO: 78 - protein, 1367 aa, Artificial Sequence
  Synthetic
DKKYSIGLDIGTNSVGWAVITDEYKVPSKKFKVLGNTDRHSIKKNLIGALLFDSGETAEATRLKRTARRRYTRRKNRICYLQEIFSNEMAKVDDSFFHRLEESFLVEEDKKHERHPIFGNIVDEVAYHEKYPTIYHLRKKLVDSTDKADLRLIYLALAHMIKFRGHFLIEGDLNPDNSDVDKLFIQLVQTYNQLFEENPINASGVDAKAILSARLSKSRRLENLIAQLPGEKKNGLFGNLIALSLGLTPNFKSNFDLAEDAKLQLSKDTYDDDLDNLLAQIGDQYADLFLAAKNLSDAILLSDILRVNTEITKAPLSASMIKRYDEHHQDLTLLKALVRQQLPEKYKEIFFDQSKNGYAGYIDGGASQEEFYKFIKPILEKMDGTEELLVKLNREDLLRKQRTFDNGSIPHQIHLGELHAILRRQEDFYPFLKDNREKIEKILTFRIPYYVGPLARGNSRFAWMTRKSEETITPWNFEEVVDKGASAQSFIERMTNFDKNLPNEKVLPKHSLLYEYFTVYNELTKVKYVTEGMRKPAFLSGEQKKAIVDLLFKTNRKVTVKQLKEDYFKKIECFDSVEISGVEDRFNASLGTYHDLLKIIKDKDFLDNEENEDILEDIVLTLTLFEDREMIEERLKTYAHLFDDKVMKQLKRRRYTGWGRLSRKLINGIRDKQSGKTILDFLKSDGFANRNFMQLIHDDSLTFKEDIQKAQVSGQGDSLHEHIANLAGSPAIKKGILQTVKVVDELVKVMGRHKPENIVIEMARENQTTQKGQKNSRERMKRIEEGIKELGSQILKEHPVENTQLQNEKLYLYYLQNGRDMYVDQELDINRLSDYDVDAIVPQSFLKDDSIDNKVLTRSDKNRGKSDNVPSEEVVKKMKNYWRQLLNAKLITQRKFDNLTKAERGGLSELDKAGFIKRQLVETRQITKHVAQILDSRMNTKYDENDKLIREVKVITLKSKLVSDFRKDFQFYKVREINNYHHAHDAYLNAVVGTALIKKYPKLESEFVYGDYKVYDVRKMIAKSEQEIGKATAKYFFYSNIMNFFKTEITLANGEIRKRPLIETNGETGEIVWDKGRDFATVRKVLSMPQVNIVKKTEVQTGGFSKESILPKRNSDKLIARKKDWDPKKYGGFVSPTVAYSVLVVAKVEKGKSKKLKSVKELLGITIMERSSFEKNPIDFLEAKGYKEVKKDLIIKLPKYSLFELENGRKRMLASARELQKGNELALPSKYVNFLYLASHYEKLKGSPEDNEQKQLFVEQHKHYLDEIIEQISEFSKRVILADANLDKVLSAYNKHRDKPIREQAENIIHLFTLTNLGAPAAFKYFDTTIDRKEYRSTKEVLDATLIHQSITGLYETRIDLSQLGGD

SEQ ID NO: 79 - protein, 1300 aa, Francisella novicida
MSIYQEFVNKYSLSKTLRFELIPQGKTLENIKARGLILDDEKRAKDYKKAKQIIDKYHQFFIEEILSSVCISEDLLQNYSDVYFKLKKSDDDNLQKDFKSAKDTIKKQISEYIKDSEKFKNLFNQNLIDAKKGQESDLILWLKQSKDNGIELFKANSDITDIDEALEIIKSFKGWTTYFKGFHENRKNVYSSNDIPTSIIYRIVDDNLPKFLENKAKYESLKDKAPEAINYEQIKKDLAEELTFDIDYKTSEVNQRVFSLDEVFEIANFNNYLNQSGITKFNTIIGGKFVNGENTKRKGINEYINLYSQQINDKTLKKYKMSVLFKQILSDTESKSFVIDKLEDDSDVVTTMQSFYEQIAAFKTVEEKSIKETLSLLFDDLKAQKLDLSKIYFKNDKSLTDLSQQVFDDYSVIGTAVLEYITQQIAPKNLDNPSKKEQELIAKKTEKAKYLSLETIKLALEEFNKHRDIDKQCRFEEILANFAAIPMIFDEIAQNKDNLAQISIKYQNQGKKDLLQASAEDDVKAIKDLLDQTNNLLHKLKIFHISQSEDKANILDKDEHFYLVFEECYFELANIVPLYNKIRNYITQKPYSDEKFKLNFENSTLANGWDKNKEPDNTAILFIKDDKYYLGVMNKKNNKIFDDKAIKENKGEGYKKIVYKLLPGANKMLPKVFFSAKSIKFYNPSEDILRIRNHSTHTKNGSPQKGYEKFEFNIEDCRKFIDFYKQSISKHPEWKDFGFRFSDTQRYNSIDEFYREVENQGYKLTFENISESYIDSVVNQGKLYLFQIYNKDFSAYSKGRPNLHTLYWKALFDERNLQDVVYKLNGEAELFYRKQSIPKKITHPAKEAIANKNKDNPKKESVFEYDLIKDKRFTEDKFFFHCPITINFKSSGANKFNDEINLLLKEKANDVHILSIDRGERHLAYYTLVDGKGNIIKQDTFNIIGNDRMKTNYHDKLAAIEKDRDSARKDWKKINNIKEMKEGYLSQVVHEIAKLVIEYNAIVVFEDLNFGFKRGRFKVEKQVYQKLEKMLIEKLNYLVFKDNEFDKTGGVLRAYQLTAPFETFKKMGKQTGIIYYVPAGFTSKICPVTGFVNQLYPKYESVSKSQEFFSKFDKICYNLDKGYFEFSFDYKNFGDKAAKGKWTIASFGSRLINFRNSDKNHNWDTREVYPTKELEKLLKDYSIEYGHGECIKAAICGESDKKFFAKLTSVLNTILQMRNSKTGTELDYLISPVADVNGNFFDSRQAPKNMPQDADANGAYHIGLKGLMLLGRIKNNQEGKKLNLVIKNEEYFEFVQNRNN

SEQ ID NO: 80 - protein, 1082 aa, Geobacillus thermodenitrificans; identical to SEQ ID NO: 31

SEQ ID NO: 81 - protein, 887 aa, Natronobacterium gregoryi
MTVIDLDSTTTADELTSGHTYDISVTLTGVYDNTDEQHPRMSLAFEQDNGERRYITLWKNTTPKDVFTYDYATGSTYIFTNIDYEVKDGYENLTATYQTTVENATAQEVGTTDEDETFAGGEPLDHHLDDALNETPDDAETESDSGHVMTSFASRDQLPEWTLHTYTLTATDGAKTDTEYARRTLAYTVRQELYTDHDAAPVATDGLMLLTPEPLGETPLDLDCGVRVEADETRTLDYTTAKDRLLARELVEEGLKRSLWDDYLVRGIDEVLSKEPVLTCDEFDLHERYDLSVEVGHSGRAYLHINFRHRFVPKLTLADIDDDNIYPGLRVKTTYRPRRGHIVWGLRDECATDSLNTLGNQSVVAYHRNNQTPINTDLLDAIEAADRRVVETRRQGHGDDAVSFPQELLAVEPNTHQIKQFASDGFHQQARSKTRLSASRCSEKAQAFAERLDPVRLNGSTVEFSSEFFTGNNEQQLRLLYENGESVLTFRDGARGAHPDETFSKGIVNPPESFEVAVVLPEQQADTCKAQWDTMADLLNQAGAPPTRSETVQYDAFSSPESISLNVAGAIDPSEVDAAFVVLPPDQEGFADLASPTETYDELKKALANMGIYSQMAYFDRFRDAKIFYTRNVALGLLAAAGGVAFTTEHAMPGDADMFIGIDVSRSYPEDGASGQINIAATATAVYKDGTILGHSSTRPQLGEKLQSTDVRDIMKNAILGYQQVTGESPTHIVIHRDGFMNEDLDPATEFLNEQGVEYDIVEIRKQPQTRLLAVSDVQYDTPVKSIAAINQNEPRATVATFGAPEYLATRDGGGLPRPIQIERVAGETDIETLTRQVYLLSQSHIQVHNSTARLPITTAYADQASTHATKGYLVQTGAFESNVGFL

SEQ ID NO: 82 - protein, 1368 aa, Streptococcus pyogenes [sequence omitted]

SEQ ID NO: 83 - RNA, 456 nt, Tetrahymena thermophila
gugggacccaaaaguuaucaggcauacaccuggagaauagcuagucuuuaaaccaauagauugcaucgguuuaaaggcuagaccgucaaauugcgggaauagggucaacagccguucaguaccaagucucaggggaaacuuugagauggcauuguaaaggguaugguaauaaacauacggacauggucccaaccacgcaaccaaguccuaagucaacagucucguacaccaucaggguacgucucagacaccaucagggucugucugguacagcaucagcguacccuguugauauggaugcaguucacagacuaaaugucggucggggaagauguauucuucucauaagauauagucgcgccucuccuuaaugggagcuagcggaugaagugaugcaacacuggagccgcugggaacuaauuuguaugcgaaaguauauugauuaguuuuggagua

SEQ ID NO: 84 - RNA, 453 nt, Tetrahymena thermophila
gcagggaaaaguuaucaggcauacaccuggagaauagcuagucuuuaaaccaauagauugcaucgguuuaaaggcuagaccgucaaauugcgggaauagggucaacagccguucaguaccaagucucaggggaaacuuugagauggcauuguaaaggguaugguaauaaacauacggacauggucccaaccacgcaaccaaguccuaagucaacagucucguacaccaucaggguacgucucagacaccaucagggucugucugguacagcaucagcguacccuguugauauggaugcaguucacagacuaaaugucggucggggaagauguauucuucucauaagauauagucgcgccucuccuuaaugggagcuagcggaugaagugaugcaacacuggagccgcugggaacuaauuuguaugcgaaaguauauugauuaguuuuggagua

SEQ ID NO: 85 - RNA, 493 nt, Tetrahymena thermophila
gcagcugagggucucaugggcguuuuagagcuagaaauagcaaguuaaaauaaggcuaguccguuaucaacuugaaaaaguggcaccgagucggugcacacggacccaaaaguuaucaggcauacaccuggagaauagcuagucuuuaaaccaauagauugcaucgguuuaaaggcuagaccgucaaauugcgggaauagggucaacagccguucaguaccaagucucaggggaaacuuugagauggcauuguaaaggguaugguaauaaacauacggacauggucccaaccacgcaaccaaguccuaagucaacagaucuucuguugauauggaugcaguucacagacuaaaugucggucggggaagauguauucuucucauaagauauagucgcgccucuccuuaaugggagcuagcggaugaagugaugcaacacuggagccgcugggaacuaauuuguaugcgaaaguauauugauuaguuuuggagua

SEQ ID NO: 86 - DNA, 410 bp, Artificial Sequence
  Synthetic
taatacgactcactataggagggaaaagttatcaggcatgcacctggtagctagtctttaaaccaatagattgcatcggtttaaaaggcaagaccgtcaaattgcgggaaaggggtcaacagccgttcagtaccaagtctcaggggaaactttgagatggccttgcaaagggtatggtaataagctgacggacatggtcctaaccacgcagccaagtcctaagtcaacagatcttctgttgatatggatgcagttcacagactaaatgtcggtcggggaagatgtattcttctcataagatatagtcggacctctccttaatgggagctagcggatgaagtgatgcaacactggagccgctgggaactaatttgtatgcgaaagtatattgattagttttggagtactcg

SEQ ID NO: 87 - DNA, 413 bp, Artificial Sequence
  Synthetic
taatacgactcactataggagggaaaagttatcaggcatacacctggagaatagctagtctttaaaccaatagattgcatcggtttaaaggctagaccgtcaaattgcgggaatagggtcaacagccgttcagtaccaagtctcaggggaaactttgagatggcattgtaaagggtatggtaataaacatacggacatggtcccaaccacgcaaccaagtcctaagtcaacagatcttctgttgatatggatgcagttcacagactaaatgtcggtcggggaagatgtattcttctcataagatatagtcgcgcctctccttaatgggagctagcggatgaagtgatgcaacactggagccgctgggaactaatttgtatgcgaaagtatattgattagttttggagtactcg

SEQ ID NO: 88 - DNA, 395 bp, Artificial Sequence
  Synthetic
gcccttggacccaaaagttatcaggcatgcacctggtagctagtctttaaaccaatagattgcatcggtttaaaaggcaagaccgtcaaattgcgggaaaggggtcaacagccgttcagtaccaagtctcaggggaaactttgagatggccttgcaaagggtatggtaataagctgacggacatggtcctaaccacgcagccaagtcctaagtcaacagatcttctgttgatatggatgcagttcacagactaaatgtcggtcggggaagatgtattcttctcataagatatagtcggacctctccttaatgggagctagcggatgaagtgatgcaacactggagccgctgggaactaatttgtatgcgaaagtatattgattagttttggagta

SEQ ID NO: 89 - DNA, 514 bp, Artificial Sequence
  Synthetic
ccggacccaaaagttatcaggcatacacctggagaatagctagtctttaaaccaatagattgcatcggtttaaaggctagaccgtcaaattgcgggaatagggtcaacagccgttcagtaccaagtctcaggggaaactttgagatggcattgtaaagggtatggtaataaacatacggacatggtcccaaccacgcaaccaagtcctaagtcaacagtttttcgtacaccatcagggtacgtttttcagacaccatcagggtctgtttttggtacagcatcagcgtacctttttcgtacaggatcaccgtacgtttttcagacaggatcaccgtctgtttttctgttgatatggatgcagttcacagactaaatgtcggtcggggaagatgtattcttctcataagatatagtcgcgcctctccttaatgggagctagcggatgaagtgatgcaacactggagccgctgggaactaatttgtatgcgaaagtatattgattagttttggagta

SEQ ID NO: 90 - DNA, 394 bp, Artificial Sequence
  Synthetic
ccggacccaaaagttatcaggcatacacctggagaatagctagtctttaaaccaatagattgcatcggtttaaaggctagaccgtcaaattgcgggaatagggtcaacagccgttcagtaccaagtctcaggggaaactttgagatggcattgtaaagggtatggtaataaacatacggacatggtcccaaccacgcaaccaagtcctaagtcaacagatcttctgttgatatggatgcagttcacagactaaatgtcggtcggggaagatgtattcttctcataagatatagtcgcgcctctccttaatgggagctagcggatgaagtgatgcaacactggagccgctgggaactaatttgtatgcgaaagtatattgattagttttggagta

SEQ ID NO: 91 - DNA, 22 bp, Artificial Sequence
  Synthetic
aggggggggaaaacccccccca

SEQ ID NO: 92 - DNA, 29 bp, Artificial Sequence
  Synthetic
ggggggggaaaaccccccccaaaaatttt

SEQ ID NO: 93 - DNA, 33 bp, Artificial Sequence
  Synthetic
gccaacatgaggatcacccatgtctgcagggcc

SEQ ID NO: 94 - protein, 131 aa, Artificial Sequence
  Synthetic
GSASNFTQFVLVDNGGTGDVTVAPSNFANGVAEWISSNSRSQAYKVTCSVRQSSAQNRKYTIKVEVPKVATQTVGGEELPVAGWRSYLNMELTIPIFATNSDCELIVKAMQGLLKDGNPIPSAIAANSGIY

SEQ ID NO: 95 - RNA, 395 nt, Artificial Sequence
  Synthetic
gcccuuggacccaaaaguuaucaggcaugcaccugguagcuagucuuuaaaccaauagauugcaucgguuuaaaaggcaagaccgucaaauugcgggaaaggggucaacagccguucaguaccaagucucaggggaaacuuugagauggccuugcaaaggguaugguaauaagcugacggacaugguccuaaccacgcagccaaguccuaagucaacagaucuucuguugauauggaugcaguucacagacuaaaugucggucggggaagauguauucuucucauaagauauagucggaccucuccuuaaugggagcuagcggaugaagugaugcaacacuggagccgcugggaacuaauuuguaugcgaaaguauauugauuaguuuuggagua

SEQ ID NO: 96 - RNA, 66 nt, Artificial Sequence
  Synthetic
ucucguacaccaucaggguacgucucagacaccaucagggucugucugguacagcaucagcguacc

SEQ ID NO: 97 - RNA, 125 nt, Artificial Sequence
  Synthetic
uuuuucguacaccaucaggguacguuuuucagacaccaucagggucuguuuuugguacagcaucagcguaccuuuuucguacaggaucaccguacguuuuucagacaggaucaccgucuguuuuu

SEQ ID NO: 98 - protein, 101 aa, Artificial Sequence
  Synthetic
MAKGQSLQDPFLNALRRERVPVSIYLVNGILQGQIESFDQFVILLKNTVSQMVYKHAISTVVPSRPVSHHSNNAGGGTSSNYHHGSSAQNTSAQQDSEETE

SEQ ID NO: 99 - RNA, 105 nt, Artificial Sequence
  Synthetic
acgguuauaaaucaacauauugauuuauaagcauggaaauccccugagugaaacaacgaauugcuguguguagucuuugcccaucucccacgaugggcuuuuuuu

SEQ ID NO: 100 - RNA, 44 nt, Artificial Sequence
  Synthetic
accgaccagaaucaugcaagugcguaagauagucgcgggccggg

SEQ ID NO: 101 - protein, 183 aa, Unknown
  Streptavidin
MRKIVVAAIAVSLTTVSITASASADPSKDSKAQVSAAEAGITGTWYNQLGSTFIVTAGADGALTGTYESAVGNAESRYVLTGRYDSAPATDGSGTALGWTVAWKNNYRNAHSATTWSGQYVGGAEARINTQWLLTSGTTEANAWKSTLVGHDTFTKVKPSAASIDAAKKAGVNNGNPLDAVQQ

SEQ ID NO: 102 - protein, 155 aa, Artificial Sequence
  Synthetic
  misc_feature (6)..(155): may be absent
GGGGSGGGGSGGGGSGGGGSGGGGSGGGGSGGGGSGGGGSGGGGSGGGGSGGGGSGGGGSGGGGSGGGGSGGGGSGGGGSGGGGSGGGGSGGGGSGGGGSGGGGSGGGGSGGGGSGGGGSGGGGSGGGGSGGGGSGGGGSGGGGSGGGGSGGGGS

SEQ ID NO: 103 - protein, 31 aa, Artificial Sequence
  Synthetic
  misc_feature (2)..(31): may be absent
GGGGGGGGGGGGGGGGGGGGGGGGGGGGGGG

SEQ ID NO: 104 - protein, 155 aa, Artificial Sequence
  Synthetic
  misc_feature (6)..(155): may be absent
EAAAKEAAAKEAAAKEAAAKEAAAKEAAAKEAAAKEAAAKEAAAKEAAAKEAAAKEAAAKEAAAKEAAAKEAAAKEAAAKEAAAKEAAAKEAAAKEAAAKEAAAKEAAAKEAAAKEAAAKEAAAKEAAAKEAAAKEAAAKEAAAKEAAAKEAAAK

SEQ ID NO: 105 - protein, 93 aa, Artificial Sequence
  Synthetic
  misc_feature (4)..(93): may be absent
GGSGGSGGSGGSGGSGGSGGSGGSGGSGGSGGSGGSGGSGGSGGSGGSGGSGGSGGSGGSGGSGGSGGSGGSGGSGGSGGSGGSGGSGGSGGS

SEQ ID NO: 106 - protein, 124 aa, Artificial Sequence
  Synthetic
  misc_feature (5)..(124): may be absent
SGGSSGGSSGGSSGGSSGGSSGGSSGGSSGGSSGGSSGGSSGGSSGGSSGGSSGGSSGGSSGGSSGGSSGGSSGGSSGGSSGGSSGGSSGGSSGGSSGGSSGGSSGGSSGGSSGGSSGGSSGGS

SEQ ID NO: 107 - protein, 62 aa, Artificial Sequence
  Synthetic
  misc_feature (1)..(1): Xaa can be any naturally occurring amino acid
  misc_feature (3)..(62): may be absent
XPXPXPXPXPXPXPXPXPXPXPXPXPXPXPXPXPXPXPXPXPXPXPXPXPXPXPXPXPXPXP

SEQ ID NO: 108 - protein, 24 aa, Artificial Sequence
  Synthetic
  misc_feature (4)..(24): may be absent
GGSGGSGGSGGSGGSGGSGGSGGS

SEQ ID NO: 109 - protein, 16 aa, Artificial Sequence
  Synthetic
SGSETPGTSESATPES

SEQ ID NO: 110 - protein, 32 aa, Artificial Sequence
  Synthetic
SGGSSGGSSGSETPGTSESATPESSGGSSGGS

SEQ ID NO: 111 - protein, 10 aa, Artificial Sequence
  Synthetic
SGGSGGSGGS

SEQ ID NO: 112 - protein, 4 aa, Artificial Sequence
  Synthetic
SGGS

SEQ ID NO: 113 - protein, 60 aa, Artificial Sequence
  Synthetic
SGGSSGGSSGSETPGTSESATPESAGSYPYDVPDYAGSAAPAAKKKKLDGSGSGGSSGGS

SEQ ID NO: 114 - protein, 3 aa, Artificial Sequence
  Synthetic
GGS

SEQ ID NO: 115 - protein, 6 aa, Artificial Sequence
  Synthetic
GGSGGS

SEQ ID NO: 116 - protein, 9 aa, Artificial Sequence
  Synthetic
GGSGGSGGS

SEQ ID NO: 117 - protein, 33 aa, Artificial Sequence
  Synthetic
SGGSSGGSSGSETPGTSESATPESSGGSSGGSS

SEQ ID NO: 118 - protein, 19 aa, Artificial Sequence
  Synthetic
MKRTADGSEFESPKKKRKV

SEQ ID NO: 119 - protein, 20 aa, Artificial Sequence
  Synthetic
AVKRPAATKKAGQAKKKKLD

SEQ ID NO: 120 - protein, 25 aa, Artificial Sequence
  Synthetic
MSRRRKANPTKLSENAKKLAKEVEN

SEQ ID NO: 121 - protein, 9 aa, Artificial Sequence
  Synthetic
PAAKRVKLD

SEQ ID NO: 122 - protein, 9 aa, Artificial Sequence
  Synthetic
KLKIKRPVK

SEQ ID NO: 123 - protein, 8 aa, Artificial Sequence
  Synthetic
VSRKRPRP

SEQ ID NO: 124 - protein, 10 aa, Artificial Sequence
  Synthetic
EGAPPAKRAR

SEQ ID NO: 125 - protein, 12 aa, Artificial Sequence
  Synthetic
PPQPKKKPLDGE

SEQ ID NO: 126 - protein, 21 aa, Artificial Sequence
  Synthetic
SGGSKRTADGSEFEPKKKRKV

SEQ ID NO: 127 - protein, 18 aa, Artificial Sequence
  Synthetic
KRTADGSEFESPKKKRKV

SEQ ID NO: 128 - protein, 17 aa, Artificial Sequence
  Synthetic
KRTADGSEFEPKKKRKV

SEQ ID NO: 129 - protein, 19 aa, Artificial Sequence
  Synthetic
NLSKRPAAIKKAGQAKKKK

SEQ ID NO: 130 - protein, 11 aa, Artificial Sequence
  Synthetic
RQRRNELKRSF

SEQ ID NO: 131 - protein, 38 aa, Artificial Sequence
  Synthetic
NQSSNFGPMKGGNFGGRSSGPYGGGGQYFAKPRNQGGY

SEQ ID NO: 132 - protein, 16 aa, Artificial Sequence
  Synthetic
  misc_feature (3)..(12): Xaa can be any naturally occurring amino acid
KRXXXXXXXXXXKKKL

SEQ ID NO: 133 - RNA, 20 nt, Artificial Sequence
  Synthetic
cccucuggaggggauacucg

SEQ ID NO: 134 - RNA, 21 nt, Artificial Sequence
  Synthetic
cccucugggaggggauacucg

SEQ ID NO: 135 - RNA, 15 nt, Artificial Sequence
  Synthetic
gggaggggauacucg

SEQ ID NO: 136 - DNA, 11 bp, Artificial Sequence
  Synthetic
gggtctagggg

SEQ ID NO: 137 - RNA, 15 nt, Artificial Sequence
  Synthetic
ggcccuuggacccua

SEQ ID NO: 138 - DNA, 12 bp, Artificial Sequence
  Synthetic
  misc_feature (7)..(7): n may be G or T, or n may be absent
gggtctnagggg

SEQ ID NO: 139 - RNA, 15 nt, Artificial Sequence
  Synthetic
ggcccuuggacccua

SEQ ID NO: 140 - DNA, 12 bp, Artificial Sequence
  Synthetic
  misc_feature (7)..(7): n may be G or A
gggtctnagggg

SEQ ID NO: 141 - RNA, 15 nt, Artificial Sequence
  Synthetic
ggcccuuggacccua

SEQ ID NO: 142 - DNA, 12 bp, Artificial Sequence
  Synthetic
gggtctgagggg

SEQ ID NO: 143 - RNA, 15 nt, Artificial Sequence
  Synthetic
ggcccuuggacccua

SEQ ID NO: 144 - DNA, 12 bp, Artificial Sequence
  Synthetic
gggtctgagggg

SEQ ID NO: 145 - RNA, 13 nt, Artificial Sequence
  Synthetic
ggcuuggacccua

SEQ ID NO: 146 - DNA, 12 bp, Artificial Sequence
  Synthetic
  misc_feature (7)..(7): n may be G ot T, or n may be absent
gggtctnagggg

SEQ ID NO: 147 - DNA, 23 bp, Artificial Sequence
  Synthetic
ggcactgcggctggaggtggggg

SEQ ID NO: 148 - DNA, 23 bp, Artificial Sequence
  Synthetic
ccgtgacgccgacctccaccccc

SEQ ID NO: 149 - DNA, 29 bp, Artificial Sequence
  Synthetic
acaagccagctgagggtctcatgggcggg

SEQ ID NO: 150 - DNA, 29 bp, Artificial Sequence
  Synthetic
tgttcggtcgactcccagagtacccgccc

SEQ ID NO: 151 - DNA, 43 bp, Artificial Sequence
  Synthetic
cagctgcgcaaggaacgccgggtctgagagccaggatagccga

SEQ ID NO: 152 - DNA, 43 bp, Artificial Sequence
  Synthetic
gtcgacgcgttccttgcggcccagactctcggtcctatcggct

SEQ ID NO: 153 - DNA, 27 bp, Artificial Sequence
  Synthetic
aggaacgccgggtctgagagccaggat

SEQ ID NO: 154 - protein, 9 aa, Artificial Sequence
  Synthetic
LPAPDSLWS

SEQ ID NO: 155 - DNA, 28 bp, Artificial Sequence
  Synthetic
aggaacgccgggtctggagagccaggat
